(19) United States
(12) Patent Application Publication
(10) Pub. No.: US 2018/0193471 A1
(43) Pub. Date: Jul. 12, 2018

(54) ß2GPI GENE EXPRESSION-SUPPRESSING NUCLEIC ACID CONJUGATE

(71) Applicant: Kyowa Hakko Kirin Co., Ltd., Tokyo (JP)

(72) Inventors: Kazutaka NAGATOMO, Tokyo (JP); Kazuhiro MASUDA, Tokyo (JP); Minako KANDA, Tokyo (JP); Yoji YAMADA, Tokyo (JP); Hiroto IWAI, Tokyo (JP); Asana MAKINO, Tokyo (JP); Shintaro HOSOE, Tokyo (JP); Takeshi KUBOYAMA, Tokyo (JP); Keiji UEHARA, Tokyo (JP); Yasuhiro SUZUKI, Tokyo (JP)

(73) Assignee: Kyowa Hakko Kirin Co., Ltd., Tokyo (JP)

(21) Appl. No.: 15/740,090

(22) PCT Filed: Jul. 15, 2016
(86) PCT No.: PCT/JP2016/071087

§ 371 Date: Dec. 27, 2017

(30) Foreign Application Priority Data
Jul. 16, 2015 (JP) 2015-142522

(51) Int. Cl. A61K 47/54; A61K 31/713; C07H 21/02; C12N 15/113; A61K 48/00; A61P 7/02; A61P 37/02

(52) U.S. Cl. CPC A61K 47/549; A61K 31/713; C07H 21/02; C12N 15/113; A61P 37/02; A61K 48/005; A61K 48/0075; A61P 7/02; A61K 48/0016

(57) ABSTRACT

The present invention provides a nucleic acid conjugate comprising: a double-stranded nucleic acid consisting of a sense strand and an antisense strand and comprising a duplex region of at least 11 base pairs; and a ligand part, wherein an oligonucleotide with a strand length of 17 to 30 nucleotides in the antisense strand is complementary to a target β2GPI mRNA sequence, and the 3′ end or 5′ end of the sense strand has a ligand part represented by following formula (I), formula (II), formula (III), formula (IV) or formula (V).

[chemical structure]

### TECHNICAL FIELD

[0001] The present invention relates to a nucleic acid conjugate that suppresses β2GPI gene expression, a composition containing the conjugate, a medicine containing the composition and the like.

### BACKGROUND ART

[0002] β2-Glycoprotein 1 (β2GPI, also called apolipoprotein H (apoH)) is a soluble glycoprotein composed of 326 amino acid residues, which is principally produced in the liver (International Journal of Clinical and Laboratory Research, 1992, Vol. 21, pp. 256-263). β2GPI is thought to have various physiological actions, and is reportedly associated with platelet aggregation reactions, coagulation and fibrinolysis reactions, and uptake of oxidized LDL by macrophages (Non-Patent Document 1).

[0003] In terms of an association with diseases, β2GPI is known as a principal antigen corresponding to antiphospholipid antibodies, which occur in autoimmune disorders such as antiphospholipid syndrome (APS) and systemic lupus erythematosus (SLE) (Non-Patent Document 2). Anti-β2GPI antibodies are also deeply involved in disease pathogenesis: it has been shown from clinical research and studies using animal models that complexes formed from β2GPI and anti-β2GPI antibodies generate activation signals on membrane receptors of various cells such as vascular endothelial cells, monocytes, platelets and trophoblasts, leading to pathologies characteristic of APS, such as thrombosis and abnormal pregnancy (Non-Patent Document 3). It is expected that such diseases can be prevented or treated by specifically inhibiting the formation of immune complexes consisting of β2GPI and anti-β2GPI antibodies. However, since β2GPI is present in blood at a relatively high concentration of 50 to 500 μg/mL, it is difficult to continuously inhibit all of β2GPI with, for example, an ordinary antibody medicine (Non-Patent Document 4).

[0004] On the other hand, methods using RNA interference (hereinafter referred to as “RNAi”) are known as methods for suppressing expression of target genes. Specifically, it has been reported that expression of a target gene has been specifically inhibited by introducing a double-stranded RNA having a sequence identical to the target gene in nematodes (Nature, 1998, Vol. 391, No. 6669, pp. 806-811). It has also been discovered that expression of a target gene can be suppressed in Drosophila by introducing a double-stranded RNA having a length of 21 to 23 bases instead of a longer double-stranded RNA. This is called short interfering RNA (siRNA) (WO 01/75164).

[0005] RNAi has also been verified in many in vivo tests, and it has been reported that siRNA having a length of 50 base pairs or less provides effects in fetal animals (see the specification of US Patent Publication No. 2002/132788) and effects in adult mice (WO 03/10180) by. It has also been confirmed that intravenous administration of siRNA to fetal mice suppresses the expression of specific genes in the kidney, spleen, lungs, pancreas and liver (Nature Genetics, 2002, Vol. 32, No. 1, pp. 107-108). Furthermore, it has also been reported that direct administration of siRNA to brain cells suppresses the expression of a specific gene (Nature Biotechnology, 2002, Vol. 20, No. 10, pp. 1006-1010).

[0006] One method that has been reported to be effective for delivering medicines (especially nucleic acids) in vivo is use of a nucleic acid complex (conjugate) having a targeting compound and a nucleic acid (especially siRNA). The targeting compound may be a ligand capable of binding to an expressed extracellular receptor. In particular, there have been many reports of nucleic acid conjugates using ligands such as N-acetyl-D-galactosamine (GalNAc), which can bind to the asialoglycoprotein receptor (ASGPR), which is highly expressed in liver cells. Recently, it was reported that nucleic acid conjugates having siRNA bound to such ligands can be effectively delivered to liver cells (Non-Patent Document 5).

[0007] Complexes of targeting compounds and siRNA are described for example in Patent Documents 1 to 4.

[0008] For example, Patent Documents 1 and 2 disclose the following nucleic acid conjugate.

(In this formula and below, Ac represents acetyl group).

[0009] Patent Document 3 discloses the following nucleic acid conjugate for example.

[0010] Patent Document 4 also discloses similar nucleic acid conjugates.

[0011] Although Patent Documents 5 and 6 disclose a part of a siRNA sequence targeting the human β2GPI gene, they do not disclose that this siRNA sequence suppresses expression of the human β2GPI gene.

### CITATION LIST

### Patent Documents

[0012] Patent Document 1: WO 2009/073809

[0013] Patent Document 2: WO 2013/075035

[0014] Patent Document 3: WO 2013/166121

[0015] Patent Document 4: WO 2011/104169

[0016] Patent Document 5: WO 2005/116204

[0017] Patent Document 6: WO 2008/043561

### Non-Patent Documents

[0018] Non-Patent Document 1: Annals of the New York Academy of Sciences, 2013, Vol. 1285, pp. 44-58

[0019] Non-Patent Document 2: Nature Review Rheumatology, 2011, Vol. 7, No. 6, pp. 330-339

[0020] Non-Patent Document 3: The New England Journal of Medicine, 2013, Vol. 368, No. 11, pp. 1033-1044

[0021] Non-Patent Document 4: Journal of Thrombosis and Haemostasis, 2011, Vol. 9, No. 7, pp. 1275-1284

[0022] Non-Patent Document 5: Journal of American Chemical Society, 2014, Vol. 136, pp. 16958-16961

### SUMMARY OF INVENTION

### Problem to be Solved be the Invention

[0023] An object of the present invention is to provide a nucleic acid conjugate that suppresses β2GPI gene expression, as well as a composition containing the conjugate, a medicine containing the composition and the like.

### Means for Solving the Problem

[0024] The present invention relates to (1) to (30) below.

[0025] (1) A nucleic acid conjugate comprising: a double-stranded nucleic acid consisting of a sense strand and an antisense strand and comprising a duplex region of at least 11 base pairs; and a ligand part,

[0026] wherein an oligonucleotide strand with a strand length of 17 to 30 nucleotides in the antisense strand is complementary to a target 62GPI mRNA sequence selected from the group described in Tables 4-1 to 4-16, and

[0027] the 3′ end or 5′ end of the sense strand has the ligand part represented by formula (I), formula (II), formula (III), formula (IV) or formula (V):

[chemical structure]

(wherein,

[0028] X is oligonucleotide-P(Z1)(Z2)-, where the oligonucleotide is the sense strand,

[0029] Q is absent or -T4-[Q4-P4]q4-,

[0030] R is the following structure

[chemical structure]

[0031] Z1 and Z2 are, independently of each other, O or S;

[0032] q1, q2, q3 and q4 are, independently of each other, an integer from 0 to 20;

[0033] P1, P2, P3 and P4 and T1, T2, T3 and T4 are, independently of each other, absent or —CO—, —NH—, —O—, —S—, —O—CO—, —NH—CO—, —CO—O— or CO—NH—, respectively, provided that when each of q1, q2, q3 and q4 is an integer from 2 to 20, each of P1, P2, P3 and P4 may be the same or different,

[0034] Q1, Q2, Q3 and Q4 are, independently of each other, absent or a substituted or unsubstituted C₁₋₁₄ alkylene, provided that when each of q1, q2, q3 and q4 is an integer from 2 to 20, each of Q1, Q2, Q3 and Q4 may be the same or different,

[0035] L1, L2 and L3 are, independently of each other, a sugar ligand.)

[0036] (2) The nucleic acid conjugate according to (1) above, wherein one or more of L1, L2 and L3 are a sugar ligand represented by the following structure

[chemical structure]

(wherein, Ac represents acetyl group).

[0037] (3) The nucleic acid conjugate according to (1) or (2) above, wherein L1, L2 and L3 are identical.

[0038] (4) The nucleic acid conjugate according to any of (1) to (3) above, wherein T1, T2 and T3 are identical, q1, q2 and q3 are identical, Q1, Q2 and Q3 are identical, and P1, P2 and P3 are identical.

[0039] (5) The nucleic acid conjugate according to any of (1) to (4) above, wherein R is

[chemical structure]

(wherein, Ac represents acetyl group).

[0040] (6) The nucleic acid conjugate according to any of (1) to (5) above, wherein R— Q- is

[chemical structure]

(wherein, Ac represents acetyl group, and Q4′ is a substituted or unsubstituted C₁₋₁₄ alkylene).

[0041] (7) The nucleic acid conjugate according to any of (1) to (6) above, comprising a ligand part represented by any of formulae (I) to (V) at the 3′ end of the sense strand of the double-stranded nucleic acid.

[0042] (8) The nucleic acid conjugate according to any of (1) to (6) above, comprising a ligand part represented by any of formulae (I) to (V) at the 5′ end of the sense strand of the double-stranded nucleic acid.

[0043] (9) The nucleic acid conjugate according to any of (1) to (8) above, wherein the duplex region comprises 11 to 27 base pairs, and

[0044] the second nucleotide from the 5′ end of the antisense strand, which is complementary to the target β2GPI mRNA sequence selected from the group described in Tables 4-1 to 4-16, is complementary to the second ribonucleotide from the 3′ end of the target β2GPI mRNA sequence.

[0045] (10) The nucleic acid conjugate according to any of (1) to (9) above, wherein the sense strand has a strand length of 21 to 25 nucleotides, and the antisense strand has a strand length of 21 to 25 nucleotides.

[0046] (11) The nucleic acid conjugate according to any of (1) to (10) above, wherein the double-stranded nucleic acid in which the sense strand has a strand length of 21 to 25 nucleotides and the antisense strand has a strand length of 21 to 25 nucleotides comprises a duplex region of 19 to 21 base pairs.

[0047] (12) The nucleic acid conjugate according to any of (1) to (9) above, wherein the 3′ end of the sense strand and the 5′ end of the antisense strand form a blunt end.

[0048] (13) The nucleic acid conjugate according to any of (1) to (12) above, wherein the double-stranded nucleic acid comprises a 2′-modified nucleotide.

[0049] (14) The nucleic acid conjugate according to (13) above, wherein 50% to 100% of the nucleotides in the duplex region is the 2′-modified nucleotide.

[0050] (15) The nucleic acid conjugate according to (13) or (14) above, wherein the 2′-modified nucleotide is 2′-O-methyl modified nucleotide, 2′-F modified nucleotide or 2′-H modified nucleotide.

[0051] (16) The nucleic acid conjugate according to any of (1) to (15) above, wherein the antisense strand comprises a sequence selected from the group of antisense strands described in Tables 2-1 to 2-18, Tables 3-1 to 3-18 or Tables 4-1 to 4-16.

[0052] (17) The nucleic acid conjugate according to any of (1) to (15) above, wherein the sense strand comprises a sequence selected from the group of sense strands described in Tables 2-1 to 2-18, Tables 3-1 to 3-18 or Tables 4-1 to 4-16.

[0053] (18) The nucleic acid conjugate according to any of (1) to (8) above, comprising sequences of a pair of sense/antisense strands selected from the group of sense/antisense strands described in Tables 2-1 to 2-18, Tables 3-1 to 3-18 or Tables 4-1 to 4-16.

[0054] (19) A nucleic acid conjugate-comprising composition, comprising the nucleic acid conjugate according to any of (1) to (18) above.

[0055] (20) A method for suppressing expression of a β2GPI gene, comprising introducing a double-stranded nucleic acid into cells by using the composition according to (19) above.

[0056] (21) The method according to (20) above, wherein the cells are cells in the liver of a mammal.

[0057] (22) The method according to (20) or (21) above, wherein the method of introduction into cells is a method of introduction into cells by intravenous administration or subcutaneous administration.

[0058] (23) A method for treating a β2GPI-associated disease, comprising administrating a composition according to (19) above to a mammal.

[0059] (24) The method according to (23) above, wherein the Iβ2GPI-associated disease is an autoimmune disease or thrombosis.

[0060] (25) The method according to (23) or (24) above, wherein the method of administration is intravenous administration or subcutaneous administration.

[0061] (26) A medicine for use in the treatment of a β2GPI-associated disease, comprising the composition according to (19) above.

[0062] (27) The medicine according to (26) above, wherein the β2GPI-associated disease is an autoimmune disease or thrombosis.

[0063] (28) The medicine according to (26) or (27) above, for intravenous administration or subcutaneous administration.

[0064] (29) An agent for treating an autoimmune disease or thrombosis, comprising the composition according to (19) above.

[0065] (30) The agent for treating an autoimmune disease or thrombosis according to (29) above, for intravenous administration or subcutaneous administration.

### Advantageous Effects of Invention

[0066] For example, an administration of a composition containing the nucleic acid conjugate of the present invention to a mammal can suppress β2GPI gene expression, thereby treating a β2GPI-associated disease in vivo.

### DESCRIPTION OF EMBODIMENTS

[0067] An example of a β2GPI gene (gene encoding β2GPI) targeted by the nucleic acid of the invention includes a gene corresponding to β2GPI cDNA (SEQ ID NO: 3541) recorded under Genbank Accession No. NM_000042, which produces full-length β2GPI mRNA.

[0068] The present invention provides, as a medicine, a nucleic acid conjugate comprising a double-stranded nucleic acid capable of reducing or stopping β2GPI gene expression, and a ligand part.

[0069] It also provides a method for treating a β2GPI-associated disease in vivo through suppression of β2GPI gene expression, by administering a nucleic acid conjugate-containing composition containing the conjugate to a mammal.

[0070] Moreover, the present invention also provides a method for treating or preventing disorders mediated by anti-β2GPI antibodies.

[0071] The nucleic acid conjugate of the present invention is a nucleic acid conjugate having a ligand part represented by formula (I), formula (II), formula (III), formula (IV) or formula (V) at the 3′ end or 5′ end of a sense strand constituting the double-stranded nucleic acid.

[chemical structure]

(wherein,

[0072] X is oligonucleotide-P(Z1)(Z2)-, wherein the oligonucleotide is the sense strand,

[0073] Q is absent or -T4-[Q4-P4]q4-,

[0074] R is the following structure

[chemical structure]

[0075] Z1 and Z2 are, independently of each other, O or S;

[0076] q1, q2, q3 and q4 are, independently of each other, an integer from 0 to 20;

[0077] P1, P2, P3 and P4 and T1, T2, T3 and T4 are, independently of each other, absent or —CO—, —NH—, —O—, —S—, —O—CO—, —NH—CO—, —CO—O— or CO—NH—, respectively, provided that when each of q1, q2, q3 and q4 is an integer from 2 to 20, each of P1, P2, P3 and P4 may be the same or different,

[0078] Q1, Q2, Q3 and Q4 are, independently of each other, absent or a substituted or unsubstituted C₁₋₁₄ alkylene, provided that when each of q1, q2, q3 and q4 is an integer from 2 to 20, each of Q1, Q2, Q3 and Q4 may be the same or different,

[0079] L1, L2 and L3 are, independently of each other, a sugar ligand.)

[0080] In formulae (I) to (V) above, X is oligonucleotide-P(Z1)(Z2)-, in which the oligonucleotide is the sense strand of the double-stranded nucleic acid in the nucleic acid conjugate of the present invention.

[0081] Z1 and Z2 above are, independently of each other, O or S, preferably Z1 is O and Z2 is S or O, and more preferably both Z1 and Z2 are O.

[0082] The sense strand constituting the oligonucleotide includes those described below, and preferred sense strands are also described below.

[0083] Q in formulae (I) to (V) above is either absent or -T4-[Q4-P4]q4-, preferably -T4-Q4-P4-, and more preferably —NH—CO-Q4—CO— (Q4 is defined as above).

[0084] T4 is either absent, or —CO—, —NH—, —O—, —S—, —O—CO—, —NH—CO—, —CO—O— or —CO—NH—, preferably —NH, —NH—CO— or —CO—NH—, and more preferably —NH—CO—.

[0085] Q4 above is either absent, or a substituted or unsubstituted C₁₋₁₄ alkylene, preferably a C₄₋₁₄ alkylene, more preferably a C₆₋₁₂ alkylene, and still more preferably a C₈₋₁₀ alkylene. When there are 2 or more Q4s (when q4 in the above formula is an integer from 2 to 20), Q4s may be the same or different.

[0086] Q4′ above is a substituted or unsubstituted C₁₋₁₄ alkylene, preferably a C₄₋₁₄ alkylene, more preferably a C₆₋₁₂ alkylene, and still more preferably a C₈₋₁₀ alkylene.

[0087] P4 above is either absent, or —CO—, —NH—, —O—, —S—, —O—CO—, —NH—CO—, —CO—O—or —CO—NH—, preferably —CO—, —O—, —O—CO—, —NH—CO—, —CO—O— or —CO—NH—, and more preferably —CO—, —O—, —NH—CO-or —CO—NH—. When there are 2 or more P4s (when q4 in the above formula is an integer from 2 to 20), P4s may be the same or different. When there is one P4 (when q4 in the formula is 1), P4 is preferably —CO—.

[0088] q4 above is an integer from 0 to 20, preferably 0 to 4, more preferably 1 to 3, and still more preferably 1 to 2. When q4 in the above formula is an integer from 2 to 20, Q4s and P4s may be the same or different.

[0089] R in formulae (I) to (V) above is a structure represented by formula (VI) above.

[0090] q1, q2 and q3 in the formula (VI) are, independently of each other, an integer from 0 to 20, preferably q1, q2 and q3 are 2 to 4 and may be the same or different, more preferably are 2 to 4 and are all the same, and still more preferably are all 3.

[0091] Q1, Q2 and Q3 in the formula (VI) are, independently of each other, absent or a substituted or unsubstituted C₁₋₁₄ alkylene, preferably each is independently a C₁₋₅ alkylene, and more preferably a C₂₋₄ alkylene. When q1, q2 and q3 in the formula (VI) are integers from 2 to 20, Q1, Q2 and Q3 may be the same or different.

[0092] The alkylene part of the substituted or unsubstituted C₁₋₁₄ alkylenes of Q1, Q2, Q3 and Q4 in the formulae (I) to (VI) may be any C₁₋₁₄ alkylenes. Examples of such C₁₋₁₄ alkylenes include methylene, ethylene, propylene, butylene, pentylene, hexylene, heptylene, octylene, nonylene, decylene, undecylene, dodecylene, tridecylene and tetradecylene.

[0093] In the definitions of Q1, Q2, Q3 and Q4 above, examples of the substituents of the substituted or unsubstituted C₁₋₁₄ alkylenes include alkyl groups such as methyl, ethyl, propyl, isopropyl, butyl, isobutyl and tert-butyl groups, hydroxyl group, C₁₋₄ linear or branched alkoxy groups such as methoxy, ethoxy, propoxy and butoxy groups, cyano group, and halogen groups such as fluoro, chloro and bromo groups and the like.

[0094] L1, L2 and L3 in formula (VI) above are, independently of each other, a sugar ligand.

[0095] In the present invention, a sugar ligand is a group that derives from a saccharide (monosaccharide, disaccharide, trisaccharide, polysaccharide or the like) and that is capable of binding to a receptor expressed in a target cell. In the present invention, when a sugar ligand is bound by a glycoside bond for example, the sugar ligand as a group derived from a saccharide is considered to be a part excluding a hydroxyl group involved in binding of the saccharides constituting the sugar ligand. Moreover, when bound by a glycoside bond for example, the sugar ligand as a group derived from a saccharide is considered to be a part excluding a hydrogen atom of a hydroxyl group involved in binding of the saccharides constituting the sugar ligand.

[0096] In the present invention, the sugar ligands may be selected according to the target cell of the double-stranded nucleic acid.

[0097] Examples of monosaccharides include allose, altose, arabinose, cladinose, erythrose, erythrulose, fructose, D-fucitol, L-fucitol, fucosamine, fucose, fuculose, galactosamine, D-galactosaminitol, N-acetyl-galactosamine, galactose, glucosamine, N-acetyl-glucosamine, glucosaminitol, glucose, glucose-6-phosphate, gulose, glyceraldehyde, L-glycero-D-mannoheptose, glycerol, glycerone, gulose, idose, lyxose, mannosamine, mannose, mannose-6-phosphate, psicose, quinovose, quinovosamine, rhamnitol, rhamnosamine, rhamnose, ribose, ribulose, sedoheptulose, sorbose, tagatose, talose, tartaric acid, threose, xylose and xylulose.

[0098] Examples of disaccharides, trisaccharides and polysaccharides include abequose, acarbose, amicetose, amylopectin, amylose, apiose, arcanose, ascarylose, ascorbic acid, boivinose, cellobiose, cellotriose, cellulose, chacotriose, chalcose, chitin, colitose, cyclodextrin, cymarose, dextrin, 2-deoxyribose, 2-deoxyglucose, diginose, digitalose, digitoxose, evalose, evemitrose, fructo-oligosaccharide, galto-oligosaccharide, gentianose, gentiobiose, glucan, glucogen, glycogen, hamamelose, heparin, inulin, isolevoglucosenone, isomaltose, isomaltotriose, isopanose, kojibiose, lactose, lactosamine, lactosediamine, laminarabiose, levoglucosan, levoglucosenone, β-maltose, maltriose, mannan-oligosaccharide, manninotriose, melezitose, melibiose, muramic acid, mycarose, mycinose, neuraminic acid, nigerose, nojirimycin, noviose, oleandrose, panose, paratose, planteose, primeverose, raffinose, rhodinose, rutinose, sarmentose, sedoheptulose, sedoheptulosan, solatriose, sophorose, stachyose, streptose, sucrose, α,α-trehalose, trehalosamine, turanose, tyvelose, xylobiose and umbelliferose.

[0099] Each monosaccharide in the saccharides may be in D-form or L-form, and may also be a mixture of D- and L-forms in any proportions.

[0100] The saccharide may also include a deoxysaccharide (one in which an alcoholic hydroxyl group has been replaced by a hydrogen atom), an aminosaccharide (one in which an alcoholic hydroxyl group has been replaced by an amino group), a thiosaccharide (one in which an alcoholic hydroxyl group has been replaced by a thiol group, or C═O has been replaced by C═S, or a ring oxygen has been replaced by sulfur), a selenosaccharide, a tellurosaccharide, an azasaccharide (one in which a ring carbon has been replaced by nitrogen), an iminosaccharide (one in which a ring oxygen has been replaced by nitrogen), a phosphanosaccharide (one in which a ring oxygen has been replaced by phosphorus), a phosphasaccharide (one in which a ring carbon has been replaced by phosphorus), a C-substituted monosaccharide (one in which a hydrogen at a non-terminal carbon atom is replaced by a carbon atom), an unsaturated monosaccharide, an alditol (one in which a carbonyl group is replaced by a CHOH group), an aldonic acid (one in which an aldehyde group is replaced by a carboxyl group), a ketoaldonic acid, a uronic acid or an aldaric acid.

[0101] Regarding aminosaccharides, examples of amino monosaccharides in the saccharide include galactosamine, glucosamine, mannosamine, fucosamine, quinovosamine, neuraminic acid, muramic acid, lactose diamine, acosamine, bacillosamine, daunosamine, desosamine, forosamine, gallosamine, kanosamine, kansosamine, mycaminose, mycosamine, perosamine, pneumosamine, purpurosamine and rhodosamine. An amino group of the aminosaccharide may also be replaced with an acetyl group or the like.

[0102] Examples of sialic acid-containing sugar chains include sugar chains containing NeuAc at the non-reducing end of the sugar chain, such as sugar chains containing NeuAc-Gal-GlcNAc, and Neu5Acα(2-6)Galβ(1-3)GlcNAc.

[0103] Each monosaccharide in the saccharide may be substituted with a substituent as long as it can bind to a receptor expressed on a target cell. For example, a hydroxyl group may be substituted, and one or more hydrogen atoms in each monosaccharide may be substituted with azide and/or an optionally substituted aryl group.

[0104] Regarding the sugar ligand of the nucleic acid conjugate of the present invention, a sugar ligand that binds to a receptor expressed on the surface of a target cell is preferably selected to target each organ. When the targeted cell is a liver cell for example, a sugar ligand targeting a receptor expressed on the surface of liver cells is preferred, and a sugar ligand targeting asialoglycoprotein receptor (ASGPR) is more preferred.

[0105] Mannose or N-acetylgalactosamine is preferred as the sugar ligand targeting ASGPR, and N-acetylgalactosamine is more preferred.

[0106] The sugar derivatives described in Bioorganic Medicinal Chemistry, Vol. 7, pp. 7254-7264, 2009 and Journal of the American Chemical Society, Vol. 134, pp. 1978-1981, 2012 are known as sugar ligands with high affinity for ASGPR, and these may be used.

[0107] The nucleic acid conjugate of the present invention may also form a salt with a pharmaceutically acceptable anion when a hydrogen ion is coordinated to a lone electron pair on any nitrogen atom.

[0108] In the present invention, examples of pharmaceutically acceptable anions include inorganic ions such as chloride ion, bromide ion, nitrate ion, sulfate ion and phosphate ion, and organic acid ions such as acetate ion, oxalate ion, maleate ion, fumarate ion, citrate ion, benzoate ion and methanesulfonate ion.

[0109] The method for producing the nucleic acid conjugate of the invention is explained here. In the production method given below, when a defined group changes under the conditions of the production method or is unsuited to implementing the production method, the target compound can be produced by applying methods ordinarily used in organic synthetic chemistry to introduce and remove protective groups, such as the methods described in Protective Groups in Organic Synthesis, Third Edition, T. W. Greene Ed., John Wiley & Sons Inc. (1999). Moreover, the order of reaction steps such as substituent introduction may also be changed as necessary.

[0110] Production Method 1

[0111] Of the nucleic acid conjugates in which the 3′ end of the sense strand of the double-stranded nucleic acid has a ligand part represented by formula (I), a sense strand in which the functional group at the right end of Q is —CO— (a sense strand in which the 3′ end of the oligonucleotide is represented by formula (I′)) can be produced by the following method. The phrase “the functional group at the right end of Q is —CO—” means that when Q in formula (I) is -T4-[Q4-P4]q4-, q4 is 0 and T4 is —CO—, or q4 is 1 or more and P4 in the -Q4-P— part of Q that binds directly to the nitrogen atom in formula (I) is —CO—.

[chemical structure]

(wherein, P1 is a protective group that can be deprotected with a base such as Fmoc, DMTr is p,p′-dimethoxytrityl group, R′ is R group in which each hydroxyl group is protected by a protective group such as acetyl group that can be deprotected with a base, Polymer is a solid-phase carrier, and Q′ is Q in which the functional group at the right end is —CO—.)

[0112] Step 1

[0113] Compound (I-B) can be produced by reacting compound (I-A) and p,p′-dimethoxytrityl chloride for 5 minutes to 100 hours at a temperature between 0° C. and 100° C. in a solvent such as pyridine in the presence of a co-solvent as necessary.

[0114] Examples of the co-solvents include methanol, ethanol, dichloromethane, chloroform, 1,2-dichloroethane, toluene, ethyl acetate, acetonitrile, diethyl ether, tetrahydrofuran, 1,2-dimethoxyethane, dioxane, N,N′-dimethylformamide (DMF), N,N-dimethylacetamide, N-methylpyrrolidone, pyridine and water, and these may be used alone or as a mixture.

[0115] Step 2

[0116] Compound (I-C) can be produced by reacting compound (I-B) for 5 minutes to 100 hours at a temperature between room temperature and 200° C. with or without a solvent in the presence of 1 to 1,000 equivalents of a secondary amine.

[0117] Examples of the solvent include methanol, ethanol, dichloromethane, chloroform, 1,2-dichloroethane, toluene, ethyl acetate, acetonitrile, diethyl ether, tetrahydrofuran, 1,2-dimethoxyethane, dioxane, N,N′-dimethylformamide (DMF), N,N-dimethylacetamide, N-methylpyrrolidone, pyridine and water, and these may be used alone or as a mixture.

[0118] Examples of the secondary amine include diethylamine and piperidine.

[0119] Step 3

[0120] Compound (1-E) can be produced by reacting compounds (I-C) and (I-D) for 5 minutes to 100 hours at a temperature between room temperature and 200° C. with or without a solvent in the presence of 1 to 30 equivalents of a base, a condensing agent, and 0.01 to 30 equivalents of an additive as necessary.

[0121] Examples of the solvent include those given as examples in step 2.

[0122] Examples of the base include cesium carbonate, potassium carbonate, potassium hydroxide, sodium hydroxide, sodium methoxide, potassium tert-butoxide, triethylamine, diisopropylethylamine, N-methylmorpholine, pyridine, 1,8-diazabicyclo[5.4.0]-7-undecene (DBU) and N,N-dimethyl-4-aminopyridine (DMAP).

[0123] Examples of the condensing agent include 1,3-dicyclohexane carbodiimide, 1-ethyl-3-(3-dimethylaminopropyl)carbodiimide-hydrochloride (EDC), carbonyldiimidazole, benzotriazol-1-yloxytris(dimethylamino)phosphonium hexafluorophosphate, (benzotriazol-1-yloxy)tripyrrolidinophosphonium hexafluorophosphate, O-(7-azabenzotriazol-1-yl)-N,N,N′,N′-tetramethyluronium hexafluorophosphate (HATU), O-(benzotriazol-1-yl)-N,N,N′,N′-tetramethyluronium hexafluorophosphate (HBTU) and 2-chloro-1-methylpyridinium iodide.

[0124] Examples of the additive include 1-hydroxybenzotriazole (HOBt) and 4-dimethylaminopyridine (DMAP).

[0125] Compound (I-D) can be obtained by known methods (see for example Journal of the American Chemical Society, Vol. 136, 16958-16961, 2014) or similar methods.

[0126] Step 4

[0127] Compound (I-F) can be produced by reacting compound (I-E) with succinic anhydride for 5 minutes to 100 hours at a temperature between room temperature and 200° C. in a solvent in the presence of 1 to 30 equivalents of a base.

[0128] Examples of the solvent include those listed in step 2.

[0129] Examples of the base include those listed in step 3.

[0130] Step 5

[0131] Compound (I-G) can be produced by reacting compound (I-F) with a terminally aminated solid-phase carrier for 5 minutes to 100 hours at a temperature between room temperature and 200° C. with or without a solvent in the presence of 1 to 30 equivalents of a base, a condensing agent, and 0.01 to 30 equivalents of an additive as necessary, and then further reacting with an acetic anhydride/pyridine solution for 5 minutes to 100 hours at a temperature between room temperature and 200° C.

[0132] Examples of the solvent include those listed in step 2.

[0133] Examples of the base, the condensing agent and the additive include those listed in step 3.

[0134] The aminated solid-phase carrier may be a long-chain alkylamine-controlled pore glass (LCAA-CPG) or the like, and may be obtained as a commercial product.

[0135] Step 6

[0136] A nucleic acid conjugate in which the 3′ end of the sense strand constituting the double-stranded nucleic acid has a ligand part represented by formula (I) can be produced by elongating a corresponding nucleotide strand by known oligonucleotide chemical synthesis methods, using compound (I-G), and then performing desorption from the solid phase, deprotection of the protecting group and purification.

[0137] Examples of known oligonucleotide chemical synthesis methods include phosphoramidite method, phosphorothioate method, phosphotriester method and CEM method (Nucleic Acids Research, Vol. 35, page 3287, 2007), and synthesis may be performed using an ABI3900 high throughput nucleic acid synthesizer (Applied Biosystems, Inc.).

[0138] Desorption from the solid phase and deprotection can be performed following the oligonucleotide chemical synthesis by treating the product for 10 seconds to 72 hours with a base at a temperature of −80° C. to 200° C. with or without a solvent.

[0139] Examples of the base include ammonia, methylamine, dimethylamine, ethylamine, diethylamine, isopropylamine, diisopropylamine, piperidine, triethylamine, ethylenediamine, 1,8-diazabicyclo[5.4.0]-7-undecene (DBU) and potassium carbonate.

[0140] Examples of the solvent include water, methanol, ethanol and THF.

[0141] The oligonucleotide may be purified by a C18 reverse-phase column or anion exchange column, or preferably by a combination of these two methods. The purity of the nucleic acid conjugate after purification is preferably 90% or more, and more preferably 95% or more.

[0142] In step 3 above, as necessary, compound (I-D) may be divided into two units and condensed with the compound (I-C) in two stages. Specifically, when Q′ is —NH—CO-Q4′-CO— for example (Q4′ is a substituted or unsubstituted C₁₋₁₄ alkylene), in step 3, the compound (I-C) can be condensed with CH₃CH₂—O—CO-Q4′-CO—OH (Q4′ is defined as above) by the same methods as in step 3, and the resulting ethyl ester compound can be hydrolyzed with a base such as lithium hydroxide in a solvent such as ethanol or water, and then condensed with R′—NH₂ (R′ is defined as above) to obtain the target compound. CH₃CH₂—O—CO-Q4′-CO—OH (Q4′ is defined as above) and R′—NH₂ (R′ is defined as above) can be obtained by known methods (see for example Journal of the American Chemical Society, Vol. 136, pp. 16958-16961, 2014) or similar methods. In Q4′, the substituent and alkylene part of the substituted or unsubstituted C₁₋₁₄ alkylene are the same as above.

[0143] Of the nucleic acid conjugates in which the 3′ end of the sense strand of the double-stranded nucleic acid has a ligand part represented by formula (I), a sense strand in which the functional group at the right end of Q is not —CO— can be prepared by methods similar to those described above, known methods or a combination thereof under reaction conditions optimized according to the structure of Q. The phrase “sense strand in which the functional group at the right end of Q is not —CO—” refers to sense strands of the nucleic acid conjugates having a ligand part represented by formula (I) other than the sense strands in which the functional group at the right end of Q is —CO—.

[0144] Production Method 2

[0145] Of the nucleic acid conjugates in which the 3′ end of the sense strand of the double-stranded nucleic acid has a ligand part represented by formula (II), a sense strand in which the functional group at the right end of Q is —CO— (a sense strand in which the 3′ end of the oligonucleotide is represented by formula (II′)) can be produced by the following method.

[chemical structure]

[chemical structure]

(wherein, DMTr, R, R′, X, Q′ and Polymer are defined as above. TBDMS represents t-butyldimethylsilyl group, and Fmoc represents 9-fluorenylmethyloxycarbonyl group.)

[0146] Step 7

[0147] Compound (II-A) can be produced by reacting compound (I-A), t-butyldimethylsilyl chloride and dimethylaminopyridine in a solvent such as N,N-dimethylformamide (DMF) for 5 minutes to 100 hours at a temperature between 0° C. and 100° C., preferably in the presence of 2 equivalents of a base.

[0148] Examples of the base include those listed in step 3 of Production method 1.

[0149] Step 8

[0150] Compound (II-B) can be produced using compound (II-A) under conditions similar to those of step 1 of Production method 1.

[0151] Step 9

[0152] Compound (II-C) can be produced by reacting compound (II-B) and tetrabutylammonium fluoride (TBAF) for 5 minutes to 100 hours at a temperature between room temperature and 200° C. in a solvent.

[0153] Examples of the solvent include those listed in step 2.

[0154] Step 10

[0155] Compound (II-D) can be produced using compound (II-C) under conditions similar to those of step 2 of Production method 1.

[0156] Step 11

[0157] Compound (II-E) can be produced using compound (II-D) and compound (I-D) under conditions similar to those of step 3 of Production method 1.

[0158] Steps 12 to 14

[0159] Compound (II′) can be produced using compound (II-E) under conditions similar to those of steps 4 to 6 of Production method 1.

[0160] In step 11 above, as necessary, compound (I-D) may be divided into two units and condensed with compound (II-C) in two stages. Specifically, when Q′ is —NH—CO-Q4′-CO— for example (Q4′ is a substituted or unsubstituted C₁₋₁₄ alkylene), in step 11, compound (II-C) can be condensed with CH₃CH₂—O—CO-Q4′-CO—OH (Q4′ is defined as above) by the same methods as in step 11, and the resulting ethyl ester compound can be hydrolyzed with a base such as lithium hydroxide in a solvent such as ethanol or water, and then condensed with R′—NH₂ (R′ is defined as above) to obtain the target compound. CH₃CH₂—O—CO-Q4′-CO—OH (Q4′ is defined as above) and R′—NH₂ (R′ is defined as above) can be obtained by known methods (see for example Journal of the American Chemical Society, Vol. 136, pp. 16958-16961, 2014) or similar methods. In Q4′, the substituent and alkylene part in the substituted or unsubstituted C₁₋₁₄ alkylene are the same as above.

[0161] Of the nucleic acid conjugates in which the 3′ end of the sense strand of the double-stranded nucleic acid has a ligand part represented by formula (II), a sense strand in which the functional group at the right end of Q is not —CO— can be prepared by methods similar to those described above, known methods or a combination thereof under reaction conditions optimized according to the structure of Q.

[0162] Production Method 3

[0163] Of the nucleic acid conjugates in which the 3′ end of the sense strand of the double-stranded nucleic acid has a ligand part represented by formula (III), a sense strand in which the functional group at the right end of Q is —CO— (a sense strand in which the 3′ end of the oligonucleotide is represented by formula (III′)) can be produced by the following method.

[chemical structure]

(wherein, DMTr, Fmoc, R, R′, Q′, X and Polymer are defined as above.)

[0164] Compound (III′) can be produced using compound (III-A) under conditions similar to those of steps 1 to 6 of Production method 1. Compound (III-A) can be obtained as a commercial product.

[0165] Step 15

[0166] Compound (III-B) can be produced using compound (III-A) under conditions similar to those of step 1 of Production method 1.

[0167] Compound (III-A) can be purchased as a commercial product.

[0168] Step 16

[0169] Compound (III-C) can be produced using compound (III-B) under conditions similar to those of step 2 of Production method 1.

[0170] Step 17

[0171] Compound (III-E) can be produced using compound (III-C) under conditions similar to those of step 3 of Production method 1.

[0172] Steps 18 to 20

[0173] Compound (III′) can be produced using compound (III-E) under conditions similar to those of steps 4 to 6 of Production method 1.

[0174] In step 17 above, as necessary, compound (I-D) may be divided into two units and condensed with compound (III-C) in two stages. Specifically, when Q′ is —NH—CO-Q4′-CO— for example (Q4′ is a substituted or unsubstituted C₁₋₁₄ alkylene), in step 17, compound (III-C) can be condensed with CH₃CH₂—O—CO-Q4′-CO—OH (Q4′ is defined as above) by the same methods as in step 17, and the resulting ethyl ester compound can be hydrolyzed with a base such as lithium hydroxide in a solvent such as ethanol or water, and then condensed with R′—NH₂ (R′ is defined as above) to obtain the target compound. CH₃CH₂—O—CO-Q4′-CO—OH (Q4′ is defined as above) and R′—NH₂ (R′ is defined as above) can be obtained by known methods (see for example Journal of the American Chemical Society, Vol. 136, pp. 16958-16961, 2014) or similar methods. In Q4′, the substituent and alkylene part of the substituted or unsubstituted C₁₋₁₄ alkylene are the same as above.

[0175] Of the nucleic acid conjugates in which the 3′ end of the sense strand of the double-stranded nucleic acid has a ligand part represented by formula (III), a sense strand in which the functional group at the right end of Q is not —CO— can be prepared by methods similar to those described above, known methods or a combination thereof under reaction conditions optimized according to the structure of Q.

[0176] Production Method 4

[0177] Of the nucleic acid conjugates in which the 3′ end of the sense strand of the double-stranded nucleic acid has a ligand part represented by formula (IV), a sense strand in which the functional group at the right end of Q is —CO— (a sense strand in which the 3′ end of the oligonucleotide is represented by formula (IV′)) can be produced by the following method.

[chemical structure]

(wherein, DMTr, Fmoc, R′, Q′, X and Polymer are defined as above.)

[0178] Compound (IV′) can be produced using compound (IV-A) under conditions similar to those of steps 1 to 6 of Production method 1. Compound (IV-A) may be obtained as a commercial product.

[0179] In step 23 above, as necessary, compound (I-D) may be divided into two units and condensed with compound (IV-C) in two stages. Specifically, when Q′ is —NH—CO-Q4′-CO— for example (Q4′ is a substituted or unsubstituted C₁₋₁₄ alkylene), in step 23, compound (IV-C) can be condensed with CH₃CH₂—O—CO-Q4′-CO—OH (Q4′ is defined as above) by the same methods as in step 23, and the resulting ethyl ester compound can be hydrolyzed with a base such as lithium hydroxide in a solvent such as ethanol or water, and then condensed with R′—NH₂ (R′ is defined as above) to obtain the target compound. CH₃CH₂—O—CO-Q4′-CO—OH (Q4′ is defined as above) and R′—NH₂ (R′ is defined as above) can be obtained by known methods (see for example Journal of the American Chemical Society, Vol. 136, pp. 16958-16961, 2014) or similar methods. In Q4′, the substituent and alkylene part of the substituted or unsubstituted C₁₋₁₄ alkylene are the same as above.

[0180] Of the nucleic acid conjugates in which the 3′ end of the sense strand of the double-stranded nucleic acid has a ligand part represented by formula (IV), a sense strand in which the functional group at the right end of Q is not —CO— can be prepared by methods similar to those described above, known methods or a combination thereof under reaction conditions optimized according to the structure of Q.

[0181] Production Method 5

[0182] Of the sense strands in which the 3′ end of the oligonucleotide is represented by formula (V), a sense strand in which the functional group at the right end of Q is —CO— (a sense strand in which the 3′ end of the oligonucleotide is represented by formula (V′)) can be produced by the following Production method 5.

[chemical structure]

(wherein, DMTr, R′, X, Q′, TBDMS, Fmoc and Polymer are defined as above.)

[0183] Compound (V′) can be produced using compound (IV-A) under conditions similar to those of steps 1 to 7 in Production method 2. Compound (IV-A) can be obtained as a commercial product.

[0184] In step 31 above, as necessary, compound (I-D) may be divided into two units and condensed with compound (V-D) in two stages. Specifically, when Q′ is —NH—CO-Q4′-CO— for example (Q4′ is a substituted or unsubstituted C₁₋₁₄ alkylene), in step 31, compound (V-D) can be condensed with CH₃CH₂—O—CO-Q4′-CO—OH (Q4′ is defined as above) by the same methods as in step 31, and the resulting ethyl ester compound can be hydrolyzed with a base such as lithium hydroxide in a solvent such as ethanol or water, and then condensed with R′—NH₂ (R′ is defined as above) to obtain the target compound. CH₃CH₂—O—CO-Q4′-CO—OH (Q4′ is defined as above) and R′—NH₂ (R′ is defined as above) can be obtained by known methods (see for example Journal of the American Chemical Society, Vol. 136, pp. 16958-16961, 2014) or similar methods. In Q4′, the substituent and alkylene part of the substituted or unsubstituted C₁₋₁₄ alkylene are the same as above.

[0185] Of the nucleic acid conjugates in which the 3′ end of the sense strand of the double-stranded nucleic acid has a ligand part represented by formula (V), a sense strand in which the functional group at the right end of Q is not —CO— can be prepared by methods similar to those described above, known methods or a combination thereof under reaction conditions optimized according to the structure of Q.

[0186] Production Method 6

[0187] Of the sense strands in which the 5′ end of the oligonucleotide is represented by formula (I), a sense strand in which the functional group at the right end of Q is —CO— (a sense strand in which the 5′ end of the oligonucleotide is represented by formula (I″)) can be produced by following Production method 6.

[chemical structure]

(wherein, R, R′, Q′, DMTr and X are defined as above.)

[0188] Step 35

[0189] Compound (I-H) can be produced by reacting compound (II-E) with 2-cyanoethyl-N,N,N′,N′-tetraisopropylphosphodiamidite for 5 minutes to 100 hours at a temperature between room temperature and 200° C. with or without a solvent in the presence of a base and a reaction accelerator.

[0190] Examples of the solvent include those listed in step 2 of Production method 1.

[0191] Examples of the base include those listed in step 3 of Production method 1.

[0192] The reaction accelerator may be 1H-tetrazole, 4,5-dicyanoimidazole, 5-ethylthiotetrazole or 5-benzylthiotetrazole for example, and may be purchased as a commercial product.

[0193] Step 36

[0194] A sense strand in which the 5′ end of the oligonucleotide is represented by formula (I) can be produced by elongating a oligonucleotide strand, using compound (I-H) and then finally performing desorption from the solid phase, deprotection of the protecting group and purification. Desorption from the solid phase, deprotection of the protecting group and purification may each be performed as in step 6 of Production method 1.

[0195] Furthermore, as in Production method 1, of the nucleic acid conjugates in which the 5′ end of the sense strand of the double-stranded nucleic acid has a ligand part represented by formula (I), a sense strand in which the functional group at the right end of Q is not —CO— can be prepared by methods similar to those described above, known methods or a combination thereof under reaction conditions optimized according to the structure of Q.

[0196] Production Method 7

[0197] Of the sense strands in which the 5′ end of the oligonucleotide is represented by formula (II), a sense strand in which the functional group at the right end of Q is —CO— (a sense strand in which the 5′ end of the oligonucleotide is represented by formula (II″)) can be produced under conditions similar to those of steps 35 and 36 of Production method 6.

[chemical structure]

(wherein, R, R′, Q′, DMTr and X are as defined above.)

[0198] Moreover, as in Production method 2, of the nucleic acid conjugates in which the 5′ end of the sense strand of the double-stranded nucleic acid has a ligand part represented by formula (II), a sense strand in which the functional group at the right end of Q is not —CO— can be prepared by methods similar to those described above, known methods or a combination thereof under reaction conditions optimized according to the structure of Q.

[0199] Production Method 8

[0200] Of the sense strands in which the 5′ end of the oligonucleotide is represented by formula (III), a sense strand in which the functional group at the right end of Q is —CO— (a sense strand in which the 5′ end of the oligonucleotide is represented by formula (III′)) can be produced under conditions similar to those of steps 35 and 36 of Production method 6.

[chemical structure]

(wherein, R, R′, Q′, DMTr and X are as defined above.)

[0201] As in Production method 3, of the nucleic acid conjugates in which the 5′ end of the sense strand of the double-stranded nucleic acid has a ligand part represented by formula (III), a sense strand in which the functional group at the right end of Q is not —CO— can be prepared by methods similar to those described above, known methods or a combination thereof under the reaction conditions optimized according to the structure of Q.

[0202] Production Method 9

[0203] Of the sense strands in which the 5′ end of the oligonucleotide is represented by formula (IV), a sense strand in which the functional group at the right end of Q is —CO— (a sense strand in which the 5′ end of the oligonucleotide is represented by formula (IV′)) can be produced under conditions similar to those of steps 35 and 36 of Production method 6.

[chemical structure]

(wherein, R, R′, Q′, DMTr and X are as defined above.)

[0204] As in Production method 4, of the nucleic acid conjugates in which the 5′ end of the sense strand of the double-stranded nucleic acid has a ligand part represented by formula (IV), a sense strand in which the functional group at the right end of Q is not —CO— can be prepared by methods similar to those described above, known methods or a combination thereof under reaction conditions optimized according to the structure of Q.

[0205] Production Method 10

[0206] Of the sense strands in which the 5′ end of the oligonucleotide is represented by formula (V), a sense strand in which the functional group at the right end of Q is —CO— (a sense strand in which the 5′ end of the oligonucleotide is represented by formula (V′)) can be produced under conditions similar to those of steps 35 and 36 of Production method 6.

[chemical structure]

(wherein, R, R′, Q′, DMTr and X are as defined above.)

[0207] As in Production method 5, of the nucleic acid conjugates in which the 5′ end of the sense strand of the double-stranded nucleic acid has a ligand part represented by formula (V), a sense strand in which the functional group at the right end of Q is not —CO— can be prepared by methods similar to those described above, known methods or a combination thereof under reaction conditions optimized according to the structure of Q.

[0208] Production Method 11

[0209] The sense strand of a double-stranded nucleic acid in which the 3′ end or 5′ end of the sense strand has a ligand part represented by formula (I) to (V) and the antisense strand of the double-stranded nucleic acid can be dissolved in water or a suitable buffer, and mixed to obtain a nucleic acid conjugate in which the 3′ or 5′ end of the sense strand of the double-stranded nucleic acid is represented by formula (I).

[0210] Examples of the buffer include acetic acid buffer, tris buffer, citric acid buffer, phosphoric acid buffer and water, and these may be used alone or in a mixture.

[0211] The mixing ratio of the sense strand and the antisense strand is preferably 0.5 to 2 equivalents, more preferably 0.9 to 1.1 equivalents, or still more preferably 0.95 to 1.05 equivalents of the antisense strand per 1 equivalent of the sense strand.

[0212] After the sense strand and the antisense strand are mixed, suitable annealing may be performed. Annealing is performed by first heating the mixture of the sense strand and the antisense strand to a temperature of preferably 50° C. to 100° C., more preferably 60° C. to 100° C., or still more preferably 80° C. to 100° C., and then gradually cooling to room temperature.

[0213] The antisense strand can be obtained by the known oligonucleotide synthesis methods described above.

[0214] The nucleic acid conjugate described herein can be obtained in the form of a salt such as an acid addition salt, metal salt, ammonium salt, organic amine addition salt, amino acid addition salt or the like.

[0215] The acid addition salt may be an inorganic acid salt such as hydrochloride salt, sulfate salt or phosphate salt, or an organic acid salt such as acetate salt, maleate salt, fumarate salt, citrate salt or methanesulfonate salt. The metal salt may be an alkali metal salt such as sodium salt or potassium salt, an alkali earth metal salt such as magnesium salt or calcium salt, or an aluminum salt, zinc salt or the like. The ammonium salt may be a salt of ammonium, tetramethylammonium or the like. The organic amine addition salt may be an addition salt of morpholine, piperidine or the like. The amino acid addition salt may be an addition salt of lysine, glycine, phenylalanine or the like.

[0216] If a salt of the nucleic acid conjugate described herein is desired, when the conjugate is obtained in the form of a desired salt, it may be purified as it is, while when it is obtained in a free form, the conjugate may be dissolved or suspended in a suitable solvent, to which a corresponding acid or base is added, and the conjugate is then isolated and purified. In order to substitute the counter-ion forming the conjugate salt with another counter-ion, the conjugate salt may be dissolved or suspended in a suitable solvent, to which an acid, base and/or salt (for example, inorganic salts such as sodium chloride and ammonium chloride) is added in an amount of several equivalents to a large excess, and the conjugate is then isolated and purified.

[0217] Stereoisomers such as geometric isomers and optical isomers, tautomers and the like may be present in the nucleic acid conjugate described herein. All possible isomers and mixtures thereof are encompassed in the present invention.

[0218] The nucleic acid conjugate described herein may also exist in the form of an adduct with water or various solvents. These adducts are also encompassed in the present invention.

[0219] Moreover, the nucleic acid conjugate of the present invention also encompasses those in which a part or all of the atoms in the molecule have been replaced with atoms with a different mass number (isotopes) (such as deuterium).

[0220] Specific examples of the nucleic acid conjugate of the present invention are described in Table 1. However, the nucleic acid conjugate of the present invention is not limited to these.

[0221] In Table 1, the oligonucleotide part in nucleic acid conjugates I to V represents the sense strand of the double-stranded nucleic acid, examples of which include the sense strands represented by the sense strand sequence in Tables 2-1 to 2-18, Tables 3-1 to 3-18 or Tables 4-1 to 4-16 below.

[0222] In the present invention, a nucleic acid containing a base sequence complementary to β2GPI mRNA is called an antisense strand nucleic acid, and a nucleic acid containing a base sequence complementary to the base sequence of the antisense strand nucleic acid is also a sense strand nucleic acid.

[0223] The double-stranded nucleic acid constituting the nucleic acid conjugate in the present invention is a double-stranded nucleic acid having the ability to reduce or stop expression of the β2GPI gene when introduced into mammalian cells, and is a double-stranded nucleic acid having a sense strand and an antisense strand. The sense strand and the antisense strand comprise at least 11 base pairs, and at least 17 and not more than 30 nucleotides in the antisense strand (in other words, an oligonucleotide strand with a strand length of 17 to 30 nucleotides) are complementary to a target β2GPI mRNA sequence selected from the group described in Tables 4-1 to 4-16.

[0224] The double-stranded nucleic acid constituting the nucleic acid conjugate of the present invention may be any molecule that is a polymer of nucleotides or molecules having a function equivalent to that of the nucleotide. Examples thereof include RNA (a polymer of ribonucleotides), DNA (a polymer of deoxyribonucleotides), chimera nucleic acids consisting of RNA and DNA, and nucleotide polymers in which at least one nucleotide in these nucleic acids has been replaced with a molecule having a function equivalent to that of the nucleotide. Derivatives containing at least one molecule having a function equivalent to that of the nucleotide in these nucleic acids are also encompassed in the double-stranded nucleic acid of the present invention, which is used as a medicine. Moreover, uracil (U) may be unambiguously replaced with thymine (T).

[0225] Examples of the molecules having a function equivalent to a nucleotide include nucleotide derivatives. The nucleotide derivative may be any molecule obtained by modifying a nucleotide, and is preferably a molecule obtained by modifying a ribonucleotide or deoxyribonucleotide in order to increase or stabilize nuclease resistance, increase affinity for a complement strand nucleic acid, increase cell permeability or achieve visibility, in comparison with RNA or DNA.

[0226] Examples of the molecules obtained by modifying nucleotides include sugar-modified nucleotides, phosphate diester bond-modified nucleotides, base-modified nucleotides, and nucleotides in which at least one of the sugar part, phosphate diester bond and base has been modified.

[0227] The sugar-modified nucleotide may be a nucleotide in which all or part of the chemical structure of the sugar in the nucleotide has been modified or replaced with any substituent, or replaced with any atom, and is preferably a 2′-modified nucleotide.

[0228] The 2′-modified nucleotide may be a nucleotide in which the 2′-OH group of ribose for example has been replaced with a substituent selected from the group consisting of H, OR, R, R′OR, SH, SR, NH₂, NHR, NR₂, N₃, CN, F, Cl, Br and I (where, R is alkyl or aryl, preferably C₁₋₆ alkyl, and R′ is alkylene, preferably C₁₋₆ alkylene), preferably a nucleotide in which the 2′-OH group has been replaced with H, F or methoxy group, more preferably a nucleotide in which the 2′-OH group has been replaced with F or methoxy group. It may also be a nucleotide in which the 2′-OH group has been replaced with a substituent selected from the group consisting of 2-(methoxy)ethoxy, 3-aminopropoxy, 2-[(N,N-dimethylamino)oxy]ethoxy, 3-(N,N-dimethylamino)propoxy, 2-[2-(N,N-dimethylamino)ethoxy]ethoxy, 2-(methylamino)-2-oxoethoxy, 2-(N-methylcarbamoyl)etoxy and 2-cyanoetoxy.

[0229] The 2′-modified nucleotides constitute preferably 50% to 100%, more preferably 70% to 100%, or still more preferably 90% to 100% of the nucleotides in the double-stranded nucleic acid region. Moreover, the 2′-modified nucleotides constitute preferably 20% to 40%, more preferably 40% to 60%, or still more preferably 60% to 100% of the nucleotides of the sense strand. Furthermore, the 2′-O-methyl-modified nucleotides constitute preferably 0% to 40%, more preferably 10% to 20%, or still more preferably 20% to 40% of the nucleotides of the antisense strand.

[0230] The phosphate diester bond-modified nucleotide may be a nucleotide in which all or part of the chemical structure of the phosphate diester bond of the nucleotide has been modified or replaced with any substituent, or replaced with any atom. Examples thereof include nucleotides in which the phosphate diester bond has been replaced with a phosphorothioate bond, nucleotides in which the phosphate diester bond has been replaced with a phosphorodithioate bond, nucleotides in which the phosphate diester bond has been replaced with an alkylphosphonate bond, and nucleotides in which the phosphate diester bond has been replaced with a phosphoramidate bond

[0231] The base-modified nucleotide may be a nucleotide in which all or part of the chemical structure of the base of the nucleotide has been modified or replaced with any substituent, or replaced with any atom. Examples thereof include those in which an oxygen atom in the base has been replaced with a sulfur atom, those in which a hydrogen atom has been replaced with a C₁₋₆ alkyl group, halogen or the like, those in which a methyl group has been replaced with hydrogen, hydroxymethyl or C₂₋₆ alkyl group or the like, and those in which an amino group has been replaced with a C₁₋₆ alkyl group, C₁₋₆ alkanoyl group, oxo group, hydroxy group or the like.

[0232] Examples of the nucleotide derivatives also include those obtained by adding another chemical substance such as a peptide, a protein, a sugar, a lipid, a phospholipid, phenazine, folate, phenanthrizine, anthraquinone, acridine, fluorescein, rhodamine, coumarin and a dye, either directly or via a linker, to a nucleotide or a nucleotide in which at least one of the sugar part, phosphate diester bond and base is modified. Specific examples include 5′-polyamine addition nucleotide derivatives, cholesterol addition nucleotide derivatives, steroid addition nucleotide derivatives, bile acid addition nucleotide derivatives, vitamin addition nucleotide derivatives, Cy5 addition nucleotide derivatives, Cy3 addition nucleotide derivatives, 6-FAM addition nucleotide derivatives and biotin addition nucleotide derivatives.

[0233] The nucleotide derivative may also form, together with another nucleotide or nucleotide derivative in the nucleic acid, a crosslinked structure such as an alkylene structure, peptide structure, nucleotide structure, ether structure, ester structure and a combination of at least one of these structures.

[0234] The term “complementation” described herein means a relationship in which a base pair can be formed between two bases, such as relationships between adenine and thymine or uracil and between guanine and cytosine, which form mild hydrogen bonds to make the whole duplex region double-helical.

[0235] The term “complementary” described herein means not only the case in which two nucleotide sequences are completely complementary to each other, but also the case in which two nucleotide sequences have 0% to 30%, 0% to 20% or 0% to 10% mismatched nucleotides. For example, this means that an antisense strand complementary to β2GPI mRNA may have one or more substituted nucleotides in a base sequence completely complementary to the partial base sequence of that mRNA. Specifically, the antisense strand may have 1 to 8, preferably 1 to 6, 1 to 4, 1 to 3, or especially 2 or 1 mismatched nucleotide in relation to the target sequence of the target gene. If the antisense strand is 21 nucleotides in length for example, it may have 6, 5, 4, 3, 2, or 1 mismatched nucleotide in relation to the target sequence of the target gene. The mismatches may be located at the 5′ end or the 3′ end of the either sequence.

[0236] The term “complementary” also encompasses the case in which one nucleotide sequence which is completely complementary to another nucleotide sequence has one or more added and/or deleted nucleotides. For example, β2GPI mRNA and the antisense strand nucleic acid of the present invention may have one or two bulge bases in the antisense strand and/or the target β2GPI mRNA region due to addition and/or deletion of a base in the antisense strand.

[0237] The double-stranded nucleic acid of the present invention used as a medicine may be composed of any nucleotides or derivatives thereof as long as it is a nucleic acid containing a base sequence complementary to a partial base sequence of β2GPI mRNA, and/or a nucleic acid containing a base sequence complementary to the base sequence of said nucleic acid. In the double-stranded nucleic acid of the present invention, the nucleic acid containing a base sequence complementary to the target β2GPI mRNA sequence and the nucleic acid containing a base sequence complementary to the nucleotide sequence of said nucleic acid may be of any length as long as they can form a duplex strand of at least 11 base pairs. The length of the sequence capable of forming the duplex strand is normally 11 to 35 bases, preferably 15 to 30 bases, more preferably 17 to 25 bases, still more preferably 17 to 23 bases, and yet more preferably 19 to 23 bases.

[0238] A nucleic acid containing a base sequence complementary to the target β2GPI mRNA sequence may be used as the antisense strand in the nucleic acid conjugate of the present invention. It is also possible to use a nucleic acid obtained by deleting, substituting or adding 1 to 3, preferably 1 to 2, and more preferably 1 base in said nucleic acid

[0239] Either a single-stranded nucleic acid that contains a base sequence complementary to the target β2GPI mRNA sequence and that suppresses β2GPI expression, or a double-stranded nucleic acid that has a nucleic acid containing a base sequence complementary to the target β2GPI mRNA sequence and a nucleic acid containing a base sequence complementary to the base sequence of said nucleic acid and that suppresses β2GPI expression, may be used favorably as the nucleic acid that suppresses β2GPI expression.

[0240] The double-stranded nucleic acid of the present invention is a nucleic acid having two nucleotide strands which are paired and having a duplex region of at least 11 base pairs. The duplex region is a region in which nucleotides or derivatives thereof constituting the double-stranded nucleic acid form base pairs, leading to a double strand. The duplex region consists of normally 11 to 27 base pairs, preferably 15 to 25 base pairs, more preferably 15 to 23 base pairs, and still more preferably 17 to 21 base pairs.

[0241] The single-stranded nucleic acid constituting the double-stranded nucleic consists of normally 11 to 30 bases, preferably 15 to 29 bases, more preferably 15 to 27 bases, still more preferably 15 to 25 bases, and yet more preferably 17 to 23 bases.

[0242] When the double-stranded nucleic acid of the present invention used as a medicine has an additional nucleotide or nucleotide derivative not forming a double strand at the 3′ side or the 5′ side following the duplex region, this is called an overhang. When there is an overhang, the nucleotide constituting the overhang may be a ribonucleotide, a deoxyribonucleotide or a derivatives thereof.

[0243] A double-stranded nucleic acid having an overhang may be one having an overhang consisting of 1 to 6 bases, normally 1 to 3 bases, or preferably 2 bases at the 3′ end or the 5′ end of at least one strand. Examples thereof include those having an overhang consisting of dTdT (where, dT represents deoxythymidine) or UU (where, U represents uridine). The antisense strand alone, the sense strand alone or both of the antisense strand and the sense strand may have an overhang. In the present invention, a double-stranded nucleic acid having an overhang in the antisense strand is preferred. An oligonucleotide strand consisting of 17 to 30 nucleotides including a duplex region and a subsequent overhang in the antisense strand is sufficiently complementary to a target β2GPI mRNA sequence selected from the group described in Tables 4-1 to 4-16. A nucleic acid molecule that produces a double-stranded nucleic acid by an action of a ribonuclease such as Dicer (WO 2005/089287), a double-stranded nucleic acid forming a blunt end with no overhang at the 3′ end and the 5′ end, or a double-stranded nucleic acid having an overhang in only a sense strand (US 2012/0040459) may also be used as the double-stranded nucleic acid of the present invention.

[0244] A nucleic acid having a base sequence identical to the base sequence of a target gene or identical to the base sequence of its complement strand may be used as the double-stranded nucleic acid constituting the nucleic acid conjugate used in the present invention. It is also possible to use a double-stranded nucleic acid having a nucleic acid obtained by deleting 1 to 4 bases at the 5′ end or the 3′ end of at least one strand of said nucleic acid and having a nucleic acid containing a base sequence complementary to the base sequence of said nucleic acid.

[0245] The double-stranded nucleic acid constituting the nucleic acid conjugate used in the present invention may be a double-stranded RNA (dsRNA) formed from two strands of RNA, a double-stranded DNA (dsDNA) formed from two strands of DNA, or a hybrid nucleic acid formed from a strand of RNA and a strand of DNA. Alternatively, it may be a chimera nucleic acid in which one or both of the strands is formed from both DNA and RNA. Preferably it is double-stranded RNA (dsRNA).

[0246] The second nucleotide from the 5′ end of the antisense strand of the nucleic acid conjugate of the present invention is preferably complementary to the second deoxyribonucleotide from the 3′ end of the target β2GPI mRNA sequence, more preferably the 2nd to 7th nucleotides from the 5′ end of the antisense strand are completely complimentary to the 2nd to 7th deoxyribonucleotides from the 3′ end of the target β2GPI mRNA sequence, and still more preferably the 2nd to 11th nucleotides from the 5′ end of the antisense strand are completely complimentary to the 2nd to 11th deoxyribonucleotides from the 3′ end of the target β2GPI mRNA sequence. Moreover, the 11th nucleotide from the 5′ end of the antisense strand in the nucleic acid of the present invention is preferably complementary to the 11th deoxyribonucleotide from the 3′ end of the target β2GPI mRNA sequence, more preferably the 9th to 13th nucleotides from the 5′ end of the antisense strand are completely complementary to the 9th to 13th deoxyribonucleotides from the 3′ end of the target β2GPI mRNA sequence, and still more preferably the 7th to 15th nucleotides from the 5′ end of the antisense strand are completely complementary to the 7th to 15th deoxyribonucleotides from the 3′ end of the target β2GPI mRNA sequence.

[0247] The antisense strand and the sense strand of the nucleic acid conjugate of the present invention may be designed based on the base sequence (SEQ ID NO: 3541) of the cDNA (sense strand) of the full-length human β2GPI mRNA recorded as Genbank Accession No. NM_000042.

[0248] Example of a nucleic acid having β2GPI expression-suppressing activity include a double-stranded nucleic acid having an antisense strand nucleic acid of the present invention containing a base sequence complementary to β2GPI mRNA and having a sense strand nucleic acid of the present invention containing a base sequence complementary to the base sequence of said nucleic acid, and having β2GPI expression-suppressing activity. The single-stranded nucleic acids constituting this double-stranded nucleic acid consist of normally 11 to 30 bases, preferably 15 to 29 bases, more preferably 15 to 27 bases, still more preferably 15 to 25 bases, yet more preferably 17 to 23 bases, and especially preferably 19 to 21 bases. The double-stranded nucleic acid has a duplex region consisting of normally 15 to 27 base pairs, preferably 15 to 25 base pairs, more preferably 15 to 23 base pairs, and still more preferably 15 to 21 base pairs.

[0249] The double-stranded nucleic acid may be designed so as to interact with a target sequence in the β2GPI gene sequence.

[0250] The sequence of one strand of the double-stranded nucleic acid is complementary to the above target sequence. The double-stranded nucleic acid can be chemically synthesized using methods described herein.

[0251] RNA may be prepared by enzymatic or partial/total organic synthesis. Modified ribonucleotides may be introduced by enzymatic or organic synthesis in vitro. In one embodiment, each strand is prepared chemically. Methods for chemically synthesizing RNA molecules are well known in the technical field (see Nucleic Acids Research, 1998, Vol. 32, pp. 936-948). In general, double-stranded nucleic acids can be synthesized using solid-phase oligonucleotide synthesis methods (see for example Usman et al., U.S. Pat. No. 5,804,683 (Specification); U.S. Pat. No. 5,831,071 (Specification); U.S. Pat. No. 5,998,203 (Specification); U.S. Pat. No. 6,117,657 (Specification); U.S. Pat. No. 6,353,098 (Specification); U.S. Pat. No. 6,362,323 (Specification); U.S. Pat. No. 6,437,117 (Specification); U.S. Pat. No. 6,469,158 (Specification); Scaringe et al., U.S. Pat. No. 6,111,086 (Specification); U.S. Pat. No. 6,008,400 (Specification); and U.S. Pat. No. 6,111,086 (Specification)).

[0252] The single-stranded nucleic acids are synthesized by the solid-phase phosphoramidite method (Nucleic Acids Research, 1993, Vol. 30, pp. 2435-2443), deprotected, and desalted on a NAP-5 column (Amersham Pharmacia Biotech, Piscataway, N.J.). The oligomers are purified by ion-exchange high-performance liquid chromatography (IE-HPLC) in an Amersham Source 15Q column-1.0 cm, height 0.25 cm (Amersham Pharmacia Biotech, Piscataway, N.J.) using a 15 minute process linear gradient. For the gradient, the buffer is changed from a 90:10 buffer A:B to a 52:48 buffer A:B, in which buffer A is 100 mmol/L Tris pH 8.5, and buffer B is 100 mmol/L Tris pH 8.5 (1 mol/L NaCl). Monitoring is performed at 260 nm, and peaks corresponding to full-length oligonucleotide species are collected, pooled, desalted on a NAP-5 column and freeze-dried.

[0253] The purity of each single-stranded nucleic acid is determined by capillary electrophoresis (CE) in a Beckman PACE 5000 (Beckman Coulter, Inc., Fullerton, Calif.). The CE capillarity has an inner diameter of 100 μm, and contains ssDNA 100R Gel (Beckman-Coulter). Typically, about 0.6 nmol of the oligonucleotide is injected into the capillary, and detected by UV absorption at 260 nm in a 444 V/cm electrical field. A modified tris-boric acid-7 mol/L urea running buffer is purchased from Beckman-Coulter. A single-stranded nucleic acid with a purity of at least 90% in the CE evaluation is obtained for use in the tests described below. Compound identity is verified by matrix-assisted laser desorption/ionization-time of flight (MALD-TOF) mass spectrometry using a VoyagerDE® Biospectrometry workstation (Applied Biosystems, Inc., Foster City, Calif.) in accordance with the manufacturer's recommended protocols. A relative molecular mass of the single-stranded nucleic acid can be obtained within 0.2% of the predicted molecular mass.

[0254] The single-stranded nucleic acids are re-suspended at a concentration of 100 μmol/L in a buffer with the pH of 7.5 consisting of 100 mmol/L potassium acetate and 30 mmol/L HEPES. The complementary sense strand and the antisense strand are mixed in the same molar amounts to obtain a final 50 μmol/L solution of the double-stranded nucleic acid. The sample is heated for 5 minutes at 95° C., and cooled to room temperature before use. The double-stranded nucleic acid is stored at −20° C. The single-stranded nucleic acids are either freeze-dried or stored at −80° C. in nuclease-free water.

[0255] Examples of the double-stranded nucleic acid of the present invention consisting of a sense strand and an antisense strand and comprising a duplex region of at least 11 base pairs in which an oligonucleotide strand with a strand length of 17 to 30 nucleotides in the antisense strand is complementary to the target β2GPI mRNA sequence selected from the group described in Tables 4-1 to 4-16, include a double-stranded nucleic acid containing a sequence selected from the group consisting of the antisense strands described in Tables 2-1 to 2-18 and 3-1 to 3-18 and 4-1 to 4-16 below, a double-stranded nucleic acid containing a sequence selected from the group consisting of the sense strands described in Tables 2-1 to 2-18 and 3-1 to 3-18 and 4-1 to 4-16 below, or a double-stranded nucleic acid containing the sequence of a pair of sense/antisense strands selected from the group consisting of the sense/antisense strands described in Tables 2-1 to 2-18 and 3-1 to 3-18 and 4-1 to 4-16 below. That is, specific examples of the double-stranded nucleic acid constituting the nucleic acid conjugate of the present invention are double-stranded nucleic acids consisting of the sense strand and the antisense strand from Tables 2-1 to 2-18 and 3-1 to 3-18 and 4-1 to 4-16 below. In Tables 3-1 to 3-18, N(M) represents 2′-O-methyl modified RNA, N(F) represents 2′-fluorine modified RNA, and A represents phosphorothioate.

TABLE 2-1

| Double stranded | SEQ ID | Sense strand sequences | SEQ ID | Antisense strand sequence |
|---|---|---|---|---|
| nucleic acid No. | NO. | (5′-3′) | NO. | (5′-3′) |
| BH0033 | No. 4001 | UGGUAGUGCCAGUGUGACUCA | No. 4703 | UGAGUCACACUGGCACUACCAAA |
| BH0034 | No. 4002 | GGUAGUGCCAGUGUGACUCAU | No. 4704 | AUGAGUCACACUGGCACUACCAA |
| BH0035 | No. 4003 | GUAGUGCCAGUGUGACUCAUC | No. 4705 | GAUGAGUCACACUGGCACUACCA |
| BH0036 | No. 4004 | UAGUGCCAGUGUGACUCAUCC | No. 4706 | GGAUGAGUCACACUGGCACUACC |
| BH0037 | No. 4005 | AGUGCCAGUGUGACUCAUCCA | No. 4707 | UGGAUGAGUCACACUGGCACUAC |
| BH0038 | No. 4006 | GUGCCAGUGUGACUCAUCCAC | No. 4708 | GUGGAUGAGUCACACUGGCACUA |
| BH0039 | No. 4007 | UGCCAGUGUGACUCAUCCACA | No. 4709 | UGUGGAUGAGUCACACUGGCACU |
| BH0040 | No. 4008 | GCCAGUGUGACUCAUCCACAA | No. 4710 | UUGUGGAUGAGUCACACUGGCAC |
| BH0041 | No. 4009 | CCAGUGUGACUCAUCCACAAU | No. 4711 | AUUGUGGAUGAGUCACACUGGCA |
| BH0042 | No. 4010 | CAGUGUGACUCAUCCACAAUG | No. 4712 | CAUUGUGGAUGAGUCACACUGGC |
| BH0043 | No. 4011 | AGUGUGACUCAUCCACAAUGA | No. 4713 | UCAUUGUGGAUGAGUCACACUGG |
| BH0044 | No. 4012 | GUGUGACUCAUCCACAAUGAU | No. 4714 | AUCAUUGUGGAUGAGUCACACUG |
| BH0045 | No. 4013 | UGUGACUCAUCCACAAUGAUU | No. 4715 | AAUCAUUGUGGAUGAGUCACACU |
| BH0046 | No. 4014 | GUGACUCAUCCACAAUGAUUU | No. 4716 | AAAUCAUUGUGGAUGAGUCACAC |
| BH0047 | No. 4015 | UGACUCAUCCACAAUGAUUUC | No. 4717 | GAAAUCAUUGUGGAUGAGUCACA |
| BH0048 | No. 4016 | GACUCAUCCACAAUGAUUUCU | No. 4718 | AGAAAUCAUUGUGGAUGAGUCAC |
| BH0050 | No. 4017 | CUCAUCCACAAUGAUUUCUCC | No. 4719 | GGAGAAAUCAUUGUGGAUGAGUC |
| BH0051 | No. 4018 | UCAUCCACAAUGAUUUCUCCA | No. 4720 | UGGAGAAAUCAUUGUGGAUGAGU |
| BH0052 | No. 4019 | CAUCCACAAUGAUUUCUCCAG | No. 4721 | CUGGAGAAAUCAUUGUGGAUGAG |
| BH0053 | No. 4020 | AUCCACAAUGAUUUCUCCAGU | No. 4722 | ACUGGAGAAAUCAUUGUGGAUGA |
| BH0054 | No. 4021 | UCCACAAUGAUUUCUCCAGUG | No. 4723 | CACUGGAGAAAUCAUUGUGGAUG |
| BH0055 | No. 4022 | CCACAAUGAUUUCUCCAGUGC | No. 4724 | GCACUGGAGAAAUCAUUGUGGAU |
| BH0056 | No. 4023 | CACAAUGAUUUCUCCAGUGCU | No. 4725 | AGCACUGGAGAAAUCAUUGUGGA |
| BH0057 | No. 4024 | ACAAUGAUUUCUCCAGUGCUC | No. 4726 | GAGCACUGGAGAAAUCAUUGUGG |
| BH0058 | No. 4025 | CAAUGAUUUCUCCAGUGCUCA | No. 4727 | UGAGCACUGGAGAAAUCAUUGUG |
| BH0059 | No. 4026 | AAUGAUUUCUCCAGUGCUCAU | No. 4728 | AUGAGCACUGGAGAAAUCAUUGU |
| BH0060 | No. 4027 | AUGAUUUCUCCAGUGCUCAUC | No. 4729 | GAUGAGCACUGGAGAAAUCAUUG |
| BH0061 | No. 4028 | UGAUUUCUCCAGUGCUCAUCU | No. 4730 | AGAUGAGCACUGGAGAAAUCAUU |
| BH0062 | No. 4029 | GAUUUCUCCAGUGCUCAUCUU | No. 4731 | AAGAUGAGCACUGGAGAAAUCAU |
| BH0063 | No. 4030 | AUUUCUCCAGUGCUCAUCUUG | No. 4732 | CAAGAUGAGCACUGGAGAAAUCA |
| BH0064 | No. 4031 | UUUCUCCAGUGCUCAUCUUGU | No. 4733 | ACAAGAUGAGCACUGGAGAAAUC |
| BH0065 | No. 4032 | UUCUCCAGUGCUCAUCUUGUU | No. 4734 | AACAAGAUGAGCACUGGAGAAAU |
| BH0066 | No. 4033 | UCUCCAGUGCUCAUCUUGUUC | No. 4735 | GAACAAGAUGAGCACUGGAGAAA |
| BH0067 | No. 4034 | CUCCAGUGCUCAUCUUGUUCU | No. 4736 | AGAACAAGAUGAGCACUGGAGAA |
| BH0068 | No. 4035 | UCCAGUGCUCAUCUUGUUCUC | No. 4737 | GAGAACAAGAUGAGCACUGGAGA |
| BH0069 | No. 4036 | CCAGUGCUCAUCUUGUUCUCG | No. 4738 | CGAGAACAAGAUGAGCACUGGAG |
| BH0070 | No. 4037 | CAGUGCUCAUCUUGUUCUCGA | No. 4739 | UCGAGAACAAGAUGAGCACUGGA |
| BH0071 | No. 4038 | AGUGCUCAUCUUGUUCUCGAG | No. 4740 | CUCGAGAACAAGAUGAGCACUGG |
| BH0072 | No. 4039 | GUGCUCAUCUUGUUCUCGAGU | No. 4741 | ACUCGAGAACAAGAUGAGCACUG |
| BH0073 | No. 4040 | UGCUCAUCUUGUUCUCGAGUU | No. 4742 | AACUCGAGAACAAGAUGAGCACU |

TABLE 2-2

| Double | | | | |
|---|---|---|---|---|
| stranded | | | | |
| nucleic | SEQ | Sense strand sequence | SEQ | Antsense strand |
| acid No | ID NO. | (5′→3′) | ID NO | sequence (5′→3′) |
| BH0074 | No. 4041 | GCUCAUCUUGUUCUCGAGUUU | No. 4743 | AAACUCGAGAACAAGAUGAGCAC |
| BH0075 | No. 4042 | CUCAUCUUGUUCUCGAGUUUU | No. 4744 | AAAACUCGAGAACAAGAUGAGCA |
| BH0076 | No. 4043 | UCAUCUUGUUCUCGAGUUUUC | No. 4745 | GAAAACUCGAGAACAAGAUGAGC |
| BH0077 | No. 4044 | CAUCUUGUUCUCGAGUUUUCU | No. 4746 | AGAAAACUCGAGAACAAGAUGAG |
| BH0078 | No. 4045 | AUCUUGUUCUCGAGUUUUCUC | No. 4747 | GAGAAAACUCGAGAACAAGAUGA |
| BH0079 | No. 4046 | UCUUGUUCUCGAGUUUUCUCU | No. 4748 | AGAGAAAACUCGAGAACAAGAUG |
| BH0080 | No. 4047 | CUUGUUCUCGAGUUUUCUCUG | No. 4749 | CAGAGAAAACUCGAGAACAAGAU |
| BH0081 | No. 4048 | UUGUUCUCGAGUUUUCUCUGG | No. 4750 | GCAGAGAAAACUCGAGAACAAGA |
| BH0083 | No. 4049 | GUUCUCGAGUUUUCUCUGCCA | No. 4751 | UGGCAGAGAAAACUCGAGAACAA |
| BH0084 | No. 4050 | UUCUCGAGUUUUCUCUGCCAU | No. 4752 | AUGGCAGAGAAAACUCGAGAACA |
| BH0085 | No. 4051 | UCUCGAGUUUUCUCUGCCAUG | No. 4753 | CAUGGCAGAGAAAACUCGAGAAC |
| BH0086 | No. 4052 | CUCGAGUUUUCUOUGCCAUGU | No. 4754 | ACAUGGCAGAGAAAACUCGAGAA |
| BH0087 | No. 4053 | UCGAGUUUUCUCUGCCAUGUU | No. 4755 | AACAUGGCAGAGAAAACUCGAGA |
| BH0088 | No. 4054 | CGAGUUUUCUCUGCCAUGUUG | No. 4756 | CAACAUGGCAGAGAAAACUCGAG |
| BH0089 | No. 4055 | GAGUUUUCUCUGGCAUGUUGC | No. 4757 | GCAACAUGGCAGAGAAAACUCGA |
| BH0090 | No. 4056 | AGUUUUCUCUGCCAUGUUGCU | No. 4758 | AGCAACAUGGCAGAGAAAACUCG |
| BH0091 | No. 4057 | GUUUUCUCUGCCAUGUUGCUA | No. 4759 | UAGCAACAUGGCAGAGAAAACUC |
| BH0092 | No. 4058 | UUUUCUCUGCCAUGUUGCUAU | No. 4760 | AUAGCAACAUGGCAGAGAAAACU |
| BH0093 | No. 4059 | UUUCUCUGCCAUGUUGCUAUU | No. 4761 | AAUAGCAACAUGGCAGAGAAAAC |
| BH0096 | No. 4060 | CUCUGCCAUGUUGCUAUUGCA | No. 4762 | UGCAAUAGCAACAUGGCAGAGAA |
| BH0097 | No. 4061 | UCUGCCAUGUUGCUAUUGCAG | No. 4763 | CUGCAAUAGCAACAUGGCAGAGA |
| BH0098 | No. 4062 | CUGCCAUGUUGCUAUUGCAGG | No. 4764 | CCUGCAAUAGCAACAUGGCAGAG |
| BH0099 | No. 4063 | UGCCAUGUUGCUAUUGCAGGA | No. 4765 | UCCUGCAAUAGCAACAUGGCAGA |
| BH0103 | No. 4064 | AUGUUGCUAUUGCAGGACGGA | No. 4766 | UCCGUCCUGCAAUAGCAACAUGG |
| BH0106 | No. 4065 | UUGCUAUUGCAGGACGGACCU | No. 4767 | AGGUCCGUCCUGCAAUAGCAACA |
| BH0107 | No. 4066 | UGCUAUUGCAGGACGGACCUG | No. 4768 | CAGGUCCGUCCUGCAAUAGCAAC |
| BH0108 | No. 4067 | GCUAUUGCAGGACGGACCUGU | No. 4769 | ACAGGUCCGUCCUGCAAUAGCAA |
| BH0109 | No. 4068 | CUAUUGCAGGACGGACCUGUC | No. 4770 | GACAGGUCCGUCCUGCAAUAGCA |
| BH0112 | No. 4069 | UUGCAGGACGGACCUGUCCCA | No. 4771 | UGGGACAGGUCCGUCCUGCAAUA |
| BH0114 | No. 4070 | GCAGGACGGACCUGUCCCAAG | No. 4772 | CUUGGGACAGGUCCGUCCUGCAA |
| BH0115 | No. 4071 | CAGGACGGACCUGUCCCAAGC | No. 4773 | GCUUGGGACAGGUCCGUCCUGCA |
| BH0117 | No. 4072 | GGACGGACCUGUCCCAAGCCA | No. 4774 | UGGCUUGGGACAGGUCCGUCCUG |
| BH0118 | No. 4073 | GACGGACCUGUCCCAAGCCAG | No. 4775 | CUGGCUUGGGACAGGUCCGUCCU |
| BH0119 | No. 4074 | ACGGACCUGUCCCAAGCCAGA | No. 4776 | UCUGGCUUGGGACAGGUCCGUCC |
| 6H0120 | No. 4075 | CGGACCUGUCCCAAGCCAGAU | No. 4777 | AUCUGGCUUGGGACAGGUCCGUC |
| BH0121 | No. 4076 | GGACCUGUCCCAAGCCAGAUG | No. 4778 | CAUCUGGCUUGGGACAGGUCCGU |
| BH0122 | No. 4077 | GACCUGUCCCAAGCCAGAUGA | No. 4779 | UCAUCUGGCUUGGGACAGGUCCG |
| BH0123 | No. 4078 | ACCUGUCCCAAGCCAGAUGAU | No. 4780 | AUCAUCUGGCUUGGGACAGGUCC |
| BH0124 | No. 4079 | CCUGUCCCAAGOCAGAUGAUU | No. 4781 | AAUCAUCUGGCUUGGGACAGGUC |
| BH0125 | No. 4080 | CUGUCCCAAGCCAGAUGAUUU | No. 4782 | AAAUCAUCUGGCUUGGGACAGGU |

TABLE 2-3

| Double | | | | |
|---|---|---|---|---|
| stranded | | | | |
| nucleic | SEQ | Sense strand sequence | SEQ | Antsense strand |
| acid No | ID NO. | (5′→3′) | ID NO | sequence (5′→3′) |
| BH0126 | No. 4081 | UGUCCCAAGCCAGAUGAUUUA | No. 4783 | UAAAUCAUCUGGCUUGGGACAGG |
| BH0127 | No. 4082 | GUCCCAAGCCAGAUGAUUUAC | No. 4784 | GUAAAUCAUCUGGCUUGGGACAG |
| BH0128 | No. 4083 | UCCCAAGCCAGAUGAUUUACC | No. 4785 | GGUAAAUCAUCUGGCUUGGGACA |
| BH0129 | No. 4084 | CCCAAGCCAGAUGAUUUACCA | No. 4786 | UGGUAAAUCAUCUGGCUUGGGAC |
| BH0130 | No. 4085 | CCAAGCCAGAUGAUUUACCAU | No. 4787 | AUGGUAAAUCAUCUGGCUUGGGA |
| BH0131 | No. 4086 | CAAGCCAGAUGAUUUACCAUU | No. 4788 | AAUGGUAAAUCAUCUGGCUUGGG |
| BH0132 | No. 4087 | AAGCCAGAUGAUUUACCAUUU | No. 4789 | AAAUGGUAAAUCAUCUGGCUUGG |
| BH0133 | No. 4088 | AGCCAGAUGAUUUACCAUUUU | No. 4790 | AAAAUGGUAAAUCAUCUGGCUUG |
| BH0134 | No. 4089 | GCCAGAUGAUUUACCAUUUUC | No. 4791 | GAAAAUGGUAAAUCAUCUGGCUU |
| BH0135 | No. 4090 | CCAGAUGAUUUACCAUUUUCC | No. 4792 | GGAAAAUGGUAAAUCAUCUGGCU |
| BH0136 | No. 4091 | CAGAUGAUUUACCAUUUUCCA | No. 4793 | GUGGAAAAUGGUAAAUCAUCUGG |
| BH0137 | No. 4092 | AGAUGAUUUACCAUUUUCCAC | No. 4794 | UGUGGAAAAUGGUAAAUCAUCUG |
| BH0138 | No. 4093 | GAUGAUUUACCAUUUUCCACA | No. 4795 | UGUGGAAAAUGGUAAAUCAUCUG |
| BH0139 | No. 4094 | AUGAUUUACCAUUUUCCACAG | No. 4796 | CUGUGGAAAAUGGUAAAUCAUCU |
| BH0143 | No. 4095 | UUUACCAUUUUCCACAGUGGU | No. 4797 | ACCACUGUGGAAAAUGGUAAAUC |
| BH0144 | No. 4096 | UUACCAUUUUCCACAGUGGUC | No. 4798 | GACCACUGUGGAAAAUGGUAAAU |
| BH0145 | No. 4097 | UACCAUUUUCCACAGUGGUCC | No. 4799 | GGACCACUGUGGAAAAUGGUAAA |
| BH0149 | No. 4098 | AUUUUCCACAGUGGUCCCGUU | No. 4800 | AACGGGACCACUGUGGAAAAUGG |
| BH0150 | No. 4099 | UUUUCCACAGUGGUCCCGUUA | No. 4801 | UAACGGGACCACUGUGGAAAAUG |
| BH0151 | No. 4100 | UUUCCACAGUGGUCCCGUUAA | No. 4802 | UUAACGGGACCACUGUGGAAAAU |
| BH0152 | No. 4101 | UUCCACAGUGGUCCCGUUAAA | No. 4803 | UUUAACGGGACCACUGUGGAAAA |
| BH0153 | No. 4102 | UCCACAGUGGUCCCGUUAAAA | No. 4804 | UUUUAACGGGACCACUGUGGAAA |
| BH0154 | No. 4103 | CCACAGUGGUCCCGUUAAAAA | No. 4805 | UUUUUAACGGGACCACUGUGGAA |
| BH0155 | No. 4104 | CACAGUGGUCCCGUUAAAAAC | No. 4806 | GUUUUUAACGGGACCACUGUGGA |
| BH0156 | No. 4105 | ACAGUGGUCCCGUUAAAAACA | No. 4807 | UGUUUUUAACGGGACCACUGUGG |
| BH0157 | No. 4106 | CAGUGGUCCCGUUAAAAACAU | No. 4808 | AUGUUUUUAACGGGACCACUGUG |
| BH0158 | No. 4107 | AGUGGUCCCGUUAAAAACAUU | No. 4809 | AAUGUUUUUAACGGGACCACUGU |
| BH0159 | No. 4108 | GUGGUCCCGUUAAAAACAUUC | No. 4810 | GAAUGUUUUUAACGGGACCACUG |
| BH0160 | No. 4109 | UGGUCCCGUUAAAAACAUUCU | No. 4811 | AGAAUGUUUUUAACGGGACCACU |
| BH0161 | No. 4110 | GGUCCCGUUAAAAACAUUCUA | No. 4812 | UAGAAUGUUUUUAACGGGACCAC |
| BH0162 | No. 4111 | GUCCCGUUAAAAACAUUCUAU | No. 4813 | AUAGAAUGUUUUUAACGGGACCA |
| BH0163 | No. 4112 | UCCCGUUAAAAACAUUCUAUG | No. 4814 | CAUAGAAUGUUUUUAACGGGACC |
| BH0164 | No. 4113 | CCCGUUAAAAACAUUCUAUGA | No. 4815 | UCAUAGAAUGUUUUUAACGGGAC |
| BH0173 | No. 4114 | AACAUUCUAUGAGCCAGGAGA | No. 4816 | UCUCCUGGCUCAUAGAAUGUUUU |
| BH0174 | No. 4115 | ACAUUCUAUGAGCCAGGAGAA | No. 4817 | UUCUCCUGGCUCAUAGAAUGUUU |
| BH0177 | No. 4116 | UUCUAUGAGCCAGGAGAAGAG | No. 4818 | CUCUUCUCCUGGCUCAUAGAAUG |
| BH0178 | No. 4117 | UCUAUGAGCCAGGAGAAGAGA | No. 4819 | UCUCUUCUCCUGGCUCAUAGAAU |
| BH0179 | No. 4118 | CUAUGAGCCAGGAGAAGAGAU | No. 4820 | AUCUCUUCUCCUGGCUCAUAGAA |
| BH0180 | No. 4119 | UAUGAGCCAGGAGAAGAGAUU | No. 4821 | AAUCUCUUCUCCUGGCUCAUAGA |
| BH0181 | No. 4120 | AUGAGCCAGGAGAAGAGAUUA | No. 4822 | UAAUCUCUUCUCCUGGCUCAUAG |

TABLE 2-4

| Double | | | | |
|---|---|---|---|---|
| stranded | | | | |
| nucleic | SEQ | Sense strand sequence | SEQ | Antsense strand |
| acid No | ID NO. | (5′→3′) | ID NO | sequence (5′→3′) |
| BH0183 | No. 4121 | GAGCCAGGAGAAGAGAUUACG | No. 4823 | CGUAAUCUCUUCUCCUGGCUCAU |
| BH0184 | No. 4122 | AGCCAGGAGAAGAGAUUACGU | No. 4824 | ACGUAAUCUCUUCUCCUGGCUCA |
| BH0185 | No. 4123 | GCCAGGAGAAGAGAUUACGUA | No. 4825 | UACGUAAUCUCUUCUCCUGGCUC |
| BH0186 | No. 4124 | CCAGGAGAAGAGAUUACGUAU | No. 4826 | AUACGUAAUCUCUUCUCCUGGCU |
| BH0187 | No. 4125 | CAGGAGAAGAGAUUACGUAUU | No. 4827 | AAUACGUAAUCUCUUCUCCUGGC |
| BH0188 | No. 4126 | AGGAGAAGAGAUUACGUAUUC | No. 4828 | GAAUACGUAAUCUCUUCUCCUGG |
| BH0189 | No. 4127 | GGAGAAGAGAUUACGUAUUCC | No. 4829 | GGAAUACGUAAUCUCUUCUCCUG |
| BH0190 | No. 4128 | GAGAAGAGAUUACGUAUUCCU | No. 4830 | AGGAAUACGUAAUCUCUUCUCCU |
| BH0193 | No. 4129 | AAGAGAUUACGUAUUCCUGCA | No. 4831 | UGCAGGAAUACGUAAUCUCUUCU |
| BH0194 | No. 4130 | AGAGAUUACGUAUUCCUGCAA | No. 4832 | UUGCAGGAAUACGUAAUCUCUUC |
| BH0195 | No. 4131 | GAGAUUACGUAUUCCUGCAAG | No. 4833 | CUUGCAGGAAUACGUAAUCUCUU |
| BH0199 | No. 4132 | UUACGUAUUCCUGCAAGCCGG | No. 4834 | CCGGCUUGCAGGAAUACGUAAUC |
| BH0203 | No. 4133 | GUAUUCCUGCAAGCCGGGCUA | No. 4835 | UAGCCCGGCUUGCAGGAAUACGU |
| BH0207 | No. 4134 | UCCUGCAAGCCGGGCUAUGUG | No. 4836 | CACAUAGCCCGGCUUGCAGGAAU |
| BH0225 | No. 4135 | GUGUCCCGAGGAGGGAUGAGA | No. 4837 | UCUCAUCCCUCCUCGGGACACAU |
| BH0226 | No. 4136 | UGUCCCGAGGAGGGAUGAGAA | No. 4838 | UUCUCAUCCCUCCUCGGGACACA |
| BH0229 | No. 4137 | CCCGAGGAGGGAUGAGAAAGU | No. 4839 | ACUUUCUCAUCCCUCCUCGGGAC |
| BH0230 | No. 4138 | CCGAGGAGGGAUGAGAAAGUU | No. 4840 | AACUUUCUCAUCCCUCCUCGGGA |
| BH0231 | No. 4139 | CGAGGAGGGAUGAGAAAGUUU | No. 4841 | AAACUUUCUCAUCCCUCCUCGGG |
| BH0232 | No. 4140 | GAGGAGGGAUGAGAAAGUUUA | No. 4842 | UAAACUUUCUCAUCCCUCCUCGG |
| BH0233 | No. 4141 | AGGAGGGAUGAGAAAGUUUAU | No. 4843 | AUAAACUUUCUCAUCCCUCCUCG |
| BH0234 | No. 4142 | GGAGGGAUGAGAAAGUUUAUC | No. 4844 | GAUAAACUUUCUCAUCCCUCCUC |
| BH0235 | No. 4143 | GAGGGAUGAGAAAGUUUAUCU | No. 4845 | AGAUAAACUUUCUCAUCCCUCCU |
| BH0236 | No. 4144 | AGGGAUGAGAAAGUUUAUCUG | No. 4846 | CAGAUAAACUUUCUCAUCCCUCC |
| BH0242 | No. 4145 | GAGAAAGUUUAUCUGCCCUCU | No. 4847 | AGAGGGCAGAUAAACUUUCUCAU |
| BH0244 | No. 4146 | GAAAGUUUAUCUGCCCUCUCA | No. 4848 | UGAGAGGGCAGAUAAACUUUCUC |
| BH0255 | No. 4147 | UGCCCUCUCACAGGACUGUGG | No. 4849 | CCACAGUCCUGUGAGAGGGCAGA |
| BH0260 | No. 4148 | UCUCACAGGACUGUGGCCCAU | No. 4850 | AUGGGCCACAGUCCUGUGAGAGG |
| BH0262 | No. 4149 | UCACAGGACUGUGGCCCAUCA | No. 4851 | UGAUGGGCCACAGUCCUGUGAGA |
| BH0265 | No. 4150 | CAGGACUGUGGCCCAUCAACA | No. 4852 | UGUUGAUGGGCCACAGUCCUGUG |
| BH0266 | No. 4151 | AGGACUGUGGCCCAUCAACAC | No. 4853 | GUGUUCAUGGGCCACAGUCCUGU |
| BH0272 | No. 4152 | GUGGCCCAUCAACACUCUGAA | No. 4854 | UUCAGAGUGUUGAUGGGCCACAG |
| BH0274 | No. 4153 | GGCCCAUCAACACUCUGAAAU | No. 4855 | AUUUCAGAGUGUUGAUGGGCCAC |
| BH0275 | No. 4154 | GCCCAUCAACACUCUGAAAUG | No. 4856 | CAUUUCAGAGUGUUGAUGGGCCA |
| BH0276 | No. 4155 | CCCAUCAACACUCUGAAAUGU | No. 4857 | ACAUUUCAGAGUGUUGAUGGGCC |
| BH0277 | No. 4156 | CCAUCAACACUCUGAAAUGUA | No. 4858 | UACAUUUCAGAGUGUUGAUGGGC |
| BH0279 | No. 4157 | AUCAACACUCUGAAAUGUACA | No. 4859 | UGUACAUUUCAGAGUGUUGAUGG |
| BH0283 | No. 4158 | ACACUCUGAAAUGUACACCCA | No. 4860 | UGGGUGUACAUUUCAGAGUGUUG |
| BH0285 | No. 4159 | ACUCUGAAAUGUACACCCAGA | No. 4861 | UCUGGGUGUACAUUUCAGAGUGU |
| BH0288 | No. 4160 | CUGAAAUGUACACCCAGAGUA | No. 4862 | UACUCUGGGUGUACAUUUCAGAG |

TABLE 2-5

| Double stranded | | Sense strand sequence | | Antisense strand sequence |
|---|---|---|---|---|
| nucleic acid No. | SEQ ID NO. | (5′→3′) | SEQ ID NO. | (5′→3′) |
| BH0289 | No. 4161 | UGAAAUGUACACCCAGAGUAU | No. 4863 | AUACUCUGGGUGUACAUUUCAGA |
| BH0291 | No. 4162 | AAAUGUACACCCAGAGUAUGU | No. 4864 | ACAUACUCUGGGUGUACAUUUCA |
| BH0294 | No. 4163 | UGUACACCCAGAGUAUGUCCU | No. 4865 | AGGACAUACUCUGGGUGUACAUU |
| BH0295 | No. 4164 | GUACACCCAGAGUAUGUCCUU | No. 4866 | AAGGACAUACUCUGGGUGUACAU |
| BH0296 | No. 4165 | UACACCCAGAGUAUGUCCUUU | No. 4867 | AAAGGACAUACUCUGGGUGUACA |
| BH0297 | No. 4166 | ACACCCAGAGUAUGUCCUUUU | No. 4868 | AAAAGGACAUACUCUGGGUGUAC |
| BH0298 | No. 4167 | CACCCAGAGUAUGUCCUUUUG | No. 4869 | CAAAAGGACAUACUCUGGGUGUA |
| BH0300 | No. 4168 | CCCAGAGUAUGUCCUUUUGCU | No. 4870 | AGCAAAAGGACAUACUCUGGGUG |
| BH0301 | No. 4169 | CCAGAGUAUGUCCUUUUGCUG | No. 4871 | CAGCAAAAGGACAUACUCUGGGU |
| BH0302 | No. 4170 | CAGAGUAUGUCCUUUUGCUGG | No. 4872 | CCAGCAAAAGGACAUACUCUGGG |
| BH0303 | No. 4171 | AGAGUAUGUCCUUUUGCUGGA | No. 4873 | UCCAGCAAAAGGACAUACUCUGG |
| BH0304 | No. 4172 | GAGUAUGUCCUUUUGCUGGAA | No. 4874 | UUCCAGCAAAAGGACAUACUCUG |
| BH0306 | No. 4173 | GUAUGUCCUUUUGCUGGAAUC | No. 4875 | GAUUCCAGCAAAAGGACAUACUC |
| BH0307 | No. 4174 | UAUGUCCUUUUGCUGGAAUCU | No. 4876 | AGAUUCCAGCAAAAGGACAUACU |
| BH0308 | No. 4175 | AUGUCCUUUUGCUGGAAUCUU | No. 4877 | AAGAUUCCAGCAAAAGGACAUAC |
| BH0309 | No. 4176 | UGUCCUUUUGCUGGAAUCUUA | No. 4878 | UAAGAUUCCAGCAAAAGGACAUA |
| BH0310 | No. 4177 | GUCCUUUUGCUGGAAUCUUAG | No. 4879 | CUAAGAUUCCAGCAAAAGGACAU |
| BH0311 | No. 4178 | UCCUUUUGCUGGAAUCUUAGA | No. 4880 | UCUAAGAUUCCAGCAAAAGGACA |
| BH0314 | No. 4179 | UUUUGCUGGAAUCUUAGAAAA | No. 4881 | UUUUCUAAGAUUCCAGCAAAAGG |
| BH0315 | No. 4180 | UUUGCUGGAAUCUUAGAAAAU | No. 4882 | AUUUUCUAAGAUUCCAGCAAAAG |
| BH0316 | No. 4181 | UUGCUGGAAUCUUAGAAAAUG | No. 4883 | CAUUUUCUAAGAUUCCAGCAAAA |
| BH0317 | No. 4182 | UGCUGGAAUCUUAGAAAAUGG | No. 4884 | CCAUUUUCUAAGAUUCCAGCAAA |
| BH0318 | No. 4183 | GCUGGAAUCUUAGAAAAUGGA | No. 4885 | UCCAUUUUCUAAGAUUCCAGCAA |
| BH0319 | No. 4184 | CUGGAAUCUUAGAAAAUGGAG | No. 4886 | CUCCAUUUUCUAAGAUUCCAGCA |
| BH0324 | No. 4185 | AUCUUAGAAAAUGGAGCCGUA | No. 4887 | UACGGCUCCAUUUUCUAAGAUUC |
| BH0327 | No. 4186 | UUAGAAAAUGGAGCCGUACGC | No. 4888 | GCGUACGGCUCCAUUUUCUAAGA |
| BH0328 | No. 4187 | UAGAAAAUGGAGCCGUACGCU | No. 4889 | AGCGUACGGCUCCAUUUUCUAAG |
| BH0329 | No. 4188 | AGAAAAUGGAGCCGUACGCUA | No. 4890 | UAGCGUACGGCUCCAUUUUCUAA |
| BH0330 | No. 4189 | GAAAAUGGAGCCGUACGCUAU | No. 4891 | AUAGCGUACGGCUCCAUUUUCUA |
| BH0331 | No. 4190 | AAAAUGGAGCCGUACGCUAUA | No. 4892 | UAUAGCGUAGGGCUCCAUUUUCU |
| BH0334 | No. 4191 | AUGGAGCCGUACGCUAUACGA | No. 4893 | UCGUAUAGCGUACGGCUCCAUUU |
| BH0335 | No. 4192 | UGGAGCCGUACGCUAUACGAC | No. 4894 | GUCGUAUAGCGUACGGCUCCAUU |
| BH0336 | No. 4103 | GGAGCCGUACGCUAUACGACU | No. 4895 | AGUCGUAUAGCGUACGGCUCCAU |
| BH0337 | No. 4194 | GAGCCGUACGCUAUACGACUU | No. 4896 | AAGUCGUAUAGCGUACGGCUCCA |
| BH0338 | No. 4195 | AGCCGUACGCUAUACGACUUU | No. 4897 | AAAGUCGUAUAGCGUACGGCUCC |
| BH0339 | No. 4196 | GCCGUACGCUAUACGACUUUU | No. 4898 | AAAAGUGGUAUAGCGUACGGCUC |
| BH0340 | No. 4197 | CCGUACGCUAUACGACUUUUG | No. 4899 | CAAAAGUCGUAUAGCGUACGGCU |
| BH0341 | No. 4198 | CGUACGCUAUACGACUUUUGA | No. 4900 | UCAAAAGUCGUAUAGCGUACGGC |
| BH0342 | No. 4199 | GUACGCUAUACGACUUUUGAA | No. 4901 | UUCAAAAGUCGUAUAGCGUACGG |
| BH0343 | No. 4200 | UACGCUAUACGACUUUUGAAU | No. 4902 | AUUCAAAAGUCGUAUAGCGUACG |

TABLE 2-6

| Double stranded | | Sense strand sequence | | Antisense strand sequence |
|---|---|---|---|---|
| nucleic acid No. | SEQ ID NO. | (5′→3′) | SEQ ID NO. | (5′→3′) |
| BH0345 | No. 4201 | CGCUAUACGACUUUUGAAUAU | No. 4903 | AUAUUCAAAAGUCGUAUAGCGUA |
| BH0346 | No. 4202 | GCUAUACGACUUUUGAAUAUC | No. 4904 | GAUAUUCAAAAGUCGUAUAGCGU |
| BH0349 | No. 4203 | AUACGACUUUUGAAUAUCCCA | No. 4905 | UGGGAUAUUCAAAAGUCGUAUAG |
| BH0350 | No. 4204 | UACGACUUUUGAAUAUCCCAA | No. 4906 | UUGGGAUAUUCAAAAGUCGUAUA |
| BH0351 | No. 4205 | ACGACUUUUGAAUAUCCCAAC | No. 4907 | GUUGGGAUAUUCAAAAGUCGUAU |
| BH0352 | No. 4206 | CGACUUUUGAAUAUCCCAACA | No. 4908 | UGUUGGGAUAUUCAAAAGUCGUA |
| BH0355 | No. 4207 | CUUUUGAAUAUCCCAACACGA | No. 4909 | UCGUGUUGGGAUAUUCAAAAGUC |
| BH0356 | No. 4208 | UUUUGAAUAUCCCAACACGAU | No. 4910 | AUCGUGUUGGGAUAUUCAAAAGU |
| BH0357 | No. 4209 | UUUGAAUAUCCCAACACGAUC | No. 4911 | GAUCGUGUUGGGAUAUUCAAAAG |
| BH0358 | No. 4210 | UUGAAUAUCCCAACACGAUCA | No. 4912 | UGAUCGUGUUGGGAUAUUCAAAA |
| BH0361 | No. 4211 | AAUAUCCCAACACGAUCAGUU | No. 4913 | AACUGAUCGUGUUGGGAUAUUCA |
| BH0362 | No. 4212 | AUAUCCCAACACGAUCAGUUU | No. 4914 | AAACUGAUCGUGUUGGGAUAUUC |
| BH0363 | No. 4213 | UAUCCCAACACGAUCAGUUUU | No. 4915 | AAAACUGAUCGUGUUGGGAUAUU |
| BH0364 | No. 4214 | AUCCCAACACGAUCAGUUUUU | No. 4916 | AAAAACUGAUCGUGUUGGGAUAU |
| BH0365 | No. 4215 | UCCCAACACGAUCAGUUUUUC | No. 4917 | GAAAAACUGAUCGUGUUGGGAUA |
| BH0366 | No. 4216 | CCCAACACGAUCAGUUUUUCU | No. 4918 | AGAAAAACUGAUCGUGUUGGGAU |
| BH0367 | No. 4217 | CCAAGACGAUCAGUUUUUCUU | No. 4919 | AAGAAAAACUGAUCGUGUUGGGA |
| BH0369 | No. 4218 | AACACGAUCAGUUUUUCUUGU | No. 4920 | ACAAGAAAAACUGAUCGUGUUGG |
| BH0370 | No. 4219 | ACACGAUCAGUUUUUCUUGUA | No. 4921 | UACAAGAAAAACUGAUCGUGUUG |
| BH0371 | No. 4220 | CACGAUCAGUUUUUCUUGUAA | No. 4922 | UUACAAGAAAAACUGAUCGUGUU |
| BH0372 | No. 4221 | ACGAUCAGUUUUUCUUGUAAC | No. 4923 | GUUACAAGAAAAACUGAUCGUGU |
| BH0373 | No. 4222 | CGAUCAGUUUUUCUUGUAACA | No. 4924 | UGUUACAAGAAAAACUGAUCGUG |
| BH0375 | No. 4223 | AUCAGUUUUUCUUGUAACACU | No. 4925 | AGUGUUACAAGAAAAACUGAUCG |
| BH0376 | No. 4224 | UCAGUUUUUCUUGUAACACUG | No. 4926 | CAGUGUUACAAGAAAAACUGAUC |
| BH0382 | No. 4225 | UUUCUUGUAACACUGGGUUUU | No. 4927 | AAAACCCAGUGUUACAAGAAAAA |
| BH0383 | No. 4226 | UUCUUGUAACACUGGGUUUUA | No. 4928 | UAAAACCCAGUGUUACAAGAAAA |
| BH0384 | No. 4227 | UCUUGUAACACUGGGUUUUAU | No. 4929 | AUAAAACCCAGUGUUACAAGAAA |
| BH0385 | No. 4228 | CUUGUAACACUGGGUUUUAUC | No. 4930 | GAUAAAACCCAGUGUUACAAGAA |
| BH0386 | No. 4229 | UUGUAACACUGGGUUUUAUCU | No. 4931 | AGAUAAAACCCAGUGUUACAAGA |
| BH0388 | No. 4230 | GUAACACUGGGUUUUAUCUGA | No. 4932 | UCAGAUAAAACCCAGUGUUACAA |
| BH0389 | No. 4231 | UAACACUGGGUUUUAUCUGAA | No. 4933 | UUCAGAUAAAACCCAGUGUUACA |
| BH0390 | No. 4232 | AACACUGGGUUUUAUCUGAAU | No. 4934 | AUUCAGAUAAAACCCAGUGUUAC |
| BH0392 | No. 4233 | CACUGGGUUUUAUCUGAAUGG | No. 4935 | CCAUUCAGAUAAAACCCAGUGUU |
| BH0394 | No. 4234 | CUGGGUUUUAUCUGAAUGGCG | No. 4936 | CGCCAUUCAGAUAAAACCCAGUG |
| BH0395 | No. 4235 | UGGGUUUUAUCUGAAUGGCGC | No. 4937 | GCGCCAUUCAGAUAAAACCCAGU |
| BH0396 | No. 4236 | GGGUUUUAUCUGAAUGGCGCU | No. 4938 | AGCGCCAUUCAGAUAAAACCCAG |
| BH0399 | No. 4237 | UUUUAUCUGAAUGGCGCUGAU | No. 4939 | AUCAGCGCCAUUCAGAUAAAACC |
| BH0402 | No. 4238 | UAUCUGAAUGGCGCUGAUUCU | No. 4940 | AGAAUCAGCGCCAUUCAGAUAAA |
| BH0406 | No. 4239 | UGAAUGGCGCUGAUUCUGCCA | No. 4941 | UGGCAGAAUCAGCGCCAUUCAGA |
| BH0409 | No. 4240 | AUGGCGCUGAUUCUGCCAAGU | No. 4942 | ACUUGGCAGAAUCAGCGCCAUUC |

TABLE 2-7

| Double stranded | | Sense strand sequence | | Antisense strand sequence |
|---|---|---|---|---|
| nucleic acid No | SEQ ID NO. | (5′→3′) | SEQ ID NO. | (5′→3′) |
| BH0410 | No. 4241 | UGGCGCUGAUUCUGCCAAGUG | No. 4943 | CACUUGGCAGAAUCAGCGCCAUU |
| BH0411 | No. 4242 | GGCGCUGAUUCUGCCAAGUGC | No. 4944 | GCACUUGGCAGAAUCAGCGCCAU |
| BH0412 | No. 4243 | GCGCUGAUUCUGCCAAGUGCA | No. 4945 | UGCACUUGGCAGAAUCAGCGCCA |
| BH0413 | No. 4244 | CGCUGAUUCUGCCAAGUGCAC | No. 4946 | GUGCACUUGGCAGAAUCAGCGCC |
| BH0414 | No. 4245 | GCUGAUUCUGCCAAGUGCACU | No. 4947 | AGUGCACUUGGCAGAAUCAGCGC |
| BH0415 | No. 4246 | CUGAUUCUGCCAAGUGCACUG | No. 4948 | CAGUGCACUUGGCAGAAUCAGCG |
| BH0419 | No. 4247 | UUCUGCCAAGUGCACUGAGGA | No. 4949 | UCCUCAGUGCACUUGGCAGAAUC |
| BH0420 | No. 4248 | UCUGCCAAGUGCACUGAGGAA | No. 4950 | UUCCUCAGUGCACUUGGCAGAAU |
| BH0422 | No. 4249 | UGCCAAGUGCACUGAGGAAGG | No. 4951 | CCUUCCUCAGUGCACUUGGCAGA |
| BH0428 | No. 4250 | GCCAAGUGCACUGAGGAAGGA | No. 4952 | UCCUUCCUCAGUGCACUUGGCAG |
| BH0424 | No. 4251 | CCAAGUGCACUGAGGAAGGAA | No. 4953 | UUCCUUCCUCAGUGCACUUGGCA |
| BH0425 | No. 4252 | CAAGUGCACUGAGGAAGGAAA | No. 4954 | UUUCCUUCCUCAGUGCACUUGGC |
| BH0426 | No. 4253 | AAGUGCACUGAGGAAGGAAAA | No. 4955 | UUUUCCUUCCUCAGUGCACUUGG |
| BH0427 | No. 4254 | AGUGCACUGAGGAAGGAAAAU | No. 4956 | AUUUUCCUUCCUCAGUGCACUUG |
| BH0436 | No. 4255 | AGGAAGGAAAAUGGAGCCCGG | No. 4957 | CCGGGCUCCAUUUUCCUUCCUCA |
| BH0449 | No. 4256 | GAGCCCGGAGCUUCCUGUCUG | No. 4958 | CAGACAGGAAGCUCCGGGCUCCA |
| BH0450 | No. 4257 | AGCCCGGAGCUUCCUGUCUGU | No. 4959 | ACAGACAGGAAGCUCCGGGCUCC |
| BH0453 | No. 4258 | CCGGAGCUUCCUGUCUGUGCU | No. 4960 | AGCACAGACAGGAAGCUCCGGGC |
| BH0454 | No. 4259 | CGGAGCUUCCUGUCUGUGCUC | No. 4961 | GAGCACAGACAGGAAGCUCCGGG |
| BH0457 | No. 4260 | AGCUUCCUGUCUGUGCUCCCA | No. 4962 | UGGGAGCACAGACAGGAAGCUCC |
| BH0461 | No. 4261 | UCCUGUCUGUGCUCCCAUCAU | No. 4963 | AUGAUGGGAGCACAGACAGGAAG |
| BH0463 | No. 4262 | CUGUCUGUGCUCCCAUCAUCU | No. 4964 | AGAUGAUGGGAGCACAGACAGGA |
| BH0472 | No. 4263 | CUCCCAUCAUCUGCCCUCCAC | No. 4965 | GUGGAGGGCAGAUGAUGGGAGCA |
| BH0475 | No. 4264 | CCAUCAUCUGCCCUCCACCAU | No. 4966 | AUGGUGGAGGGCAGAUGAUGGGA |
| BH0476 | No. 4265 | CAUCAUCUGCCCUCCACCAUC | No. 4967 | GAUGGUGGAGGGCAGAUGAUGGG |
| BH0480 | No. 4266 | AUCUGCCCUCCACCAUCCAUA | No. 4968 | UAUGGAUGGUGGAGGGCAGAUGA |
| BH0484 | No. 4267 | GCCCUCCACCAUCCAUACCUA | No. 4969 | UAGGUAUGGAUGGUGGAGGGCAG |
| BH0487 | No. 4268 | CUCCACCAUCCAUACCUACGU | No. 4970 | ACGUAGGUAUGGAUGGUGGAGGG |
| BH0488 | No. 4269 | UCCACCAUCCAUACCUACGUU | No. 4971 | AACGUAGGUAUGGAUGGUGGAGG |
| BH0489 | No. 4270 | CCACCAUCCAUACCUACGUUU | No. 4972 | AAACGUAGGUAUGGAUGGUGGAG |
| BH0490 | No. 4271 | CACCAUCCAUACCUACGUUUG | No. 4973 | CAAACGUAGGUAUGGAUGGUGGA |
| BH0491 | No. 4272 | ACCAUCCAUACCUACGUUUGC | No. 4974 | GCAAACGUAGGUAUGGAUGGUGG |
| BH0492 | No. 4273 | CCAUCCAUACCUACGUUUGCA | No. 4975 | UGCAAACGUAGGUAUGGAUGGUG |
| BH0483 | No. 4274 | CAUCCAUACCUACGUUUGCAA | No. 4976 | UUGCAAACGUAGGUAUGGAUGGU |
| BH0495 | No. 4273 | UCCAUACCUACGUUUGCAACA | No. 4977 | UGUUGCAAACGUAGGUAUGGAUG |
| BH0498 | No. 4276 | AUACCUACGUUUGGAACACUU | No. 4978 | AAGUGUUGCAAACGUAGGUAUGG |
| BH0499 | No. 4277 | UACCUACGUUUGCAACACUUC | No. 4979 | GAAGUGUUGCAAACGUAGGUAUG |
| BH0500 | No. 4278 | ACCUACGUUUGCAACACUUCG | No. 4980 | CGAAGUGUUGCAAACGUAGGUAU |
| BH0501 | No. 4279 | CCUACGUUUGCAACACUUCGU | No. 4981 | ACGAAGUGUUGCAAACGUAGGUA |
| BH0502 | No. 4280 | CUACGUUUGCAACACUUCGUG | No. 4982 | CACGAAGUGUUGCAAACGUAGGU |

TABLE 2-8

| Double stranded | | Sense strand sequence | | Antisense strand sequence |
|---|---|---|---|---|
| nucleic acid No. | SEQ ID NO. | (5′→3′) | SEQ ID NO. | (5′→3′) |
| BH0503 | No. 4281 | UACGUUUGCAACACUUCGUGU | No. 4983 | ACACGAAGUGUUGCAAACGUAGG |
| BH0504 | No. 4282 | ACGUUUGCAACACUUCGUGUU | No. 4984 | AACACGAAGUGUUGCAAACGUAG |
| BH0505 | No. 4283 | CGUUUGCAACACUUCGUGUUU | No. 4985 | AAACACGAAGUGUUGCAAACGUA |
| BH0506 | No. 4284 | GUUUGCAACACUUCGUGUUUA | No. 4986 | UAAACACGAAGUGUUGCAAACGU |
| BH0507 | No. 4285 | UUUGCAACACUUCGUGUUUAU | No. 4987 | AUAAACACGAAGUGUUGCAAACG |
| BH0508 | No. 4286 | UUGCAACACUUCGUGUUUAUA | No. 4988 | UAUAAACACGAAGUGUUGCAAAC |
| BH0509 | No. 4287 | UGCAACACUUCGUGUUUAUAA | No. 4989 | UUAUAAACACGAAGUGUUGCAAA |
| BH0510 | No. 4288 | GCAACACUUCGUGUUUAUAAG | No. 4990 | CUUAUAAACACGAAGUGUUGCAA |
| BH0513 | No. 4289 | ACACUUCGUGUUUAUAAGCCA | No. 4991 | UGGCUUAUAAACACGAAGUGUUG |
| BH0514 | No. 4290 | CACUUCGUGUUUAUAAGCCAU | No. 4992 | AUGGCUUAUAAACACGAAGUGUU |
| BH0518 | No. 4291 | UCGUGUUUAUAAGCCAUCAGC | No. 4993 | GCUGAUGGCUUAUAAACACGAAG |
| BH0519 | No. 4292 | CGUGUUUAUAAGCCAUCAGCU | No. 4994 | AGCUGAUGGCUUAUAAACACGAA |
| BH0520 | No. 4293 | GUGUUUAUAAGCCAUCAGCUG | No. 4995 | CAGCUGAUGGCUUAUAAACACGA |
| BH0526 | No. 4294 | AUAAGCCAUCAGCUGGAAACA | No. 4996 | UGUUUCCAGCUGAUGGCUUAUAA |
| BH0527 | No. 4295 | UAAGCCAUCAGCUGGAAACAA | No. 4997 | UUGUUUCCAGCUGAUGGCUUAUA |
| BH0528 | No. 4296 | AAGCCAUCAGCUGGAAACAAU | No. 4998 | AUUGUUUCCAGCUGAUGGCUUAU |
| BH0529 | No. 4297 | AGCCAUCAGCUGGAAACAAUU | No. 4999 | AAUUGUUUCCAGCUGAUGGCUUA |
| BH0530 | No. 4298 | GCCAUCAGCUGGAAACAAUUC | No. 5000 | GAAUUGUUUCCAGCUGAUGGCUU |
| BH0534 | No. 4299 | UCAGCUGGAAACAAUUCCCUC | No. 5001 | GAGGGAAUUGUUUCCAGCUGAUG |
| BH0535 | No. 4300 | CAGCUGGAAACAAUUCCCUCU | No. 5002 | AGAGGGAAUUGUUUCCAGCUGAU |
| BH0538 | No. 4301 | CUGGAAACAAUUCCCUCUAUC | No. 5003 | GAUAGAGGGAAUUGUUUCCAGCU |
| BH0542 | No. 4302 | AAACAAUUCCCUCUAUCGGGA | No. 5004 | UCCCGAUAGAGGGAAUUGUUUCC |
| BH0549 | No. 4303 | UCCCUCUAUCGGGACACAGCA | No. 5005 | UGCUGUGUCCCGAUAGAGGGAAU |
| BH0552 | No. 4304 | CUCUAUCGGGACACAGCAGUU | No. 5006 | AACUGCUGUGUCCCGAUAGAGGG |
| BH0553 | No. 4305 | UCUAUCGGGACACAGCAGUUU | No. 5007 | AAACUGCUGUGUCCCGAUAGAGG |
| BH0554 | No. 4306 | CUAUCGGGACACAGCAGUUUU | No. 5008 | AAAACUGCUGUGUCCCGAUAGAG |
| BH0555 | No. 4307 | UAUCGGGACACAGCAGUUUUU | No. 5009 | AAAAACUGCUGUGUCCCGAUAGA |
| BH0557 | No. 4308 | UCGGGACACAGCAGUUUUUGA | No. 5010 | UCAAAAACUGCUGUGUCCCGAUA |
| BH0558 | No. 4309 | CGGGACACAGCAGUUUUUGAA | No. 5011 | UUCAAAAACUGCUGUGUCCCGAU |
| BH0559 | No. 4310 | GGGACACAGCAGUUUUUGAAU | No. 5012 | AUUCAAAAACUGCUGUGUCCCGA |
| BH0561 | No. 4311 | GACACAGCAGUUUUUGAAUGU | No. 5013 | ACAUUCAAAAACUGCUGUGUCCC |
| 5H0562 | No. 4312 | ACACAGCAGUUUUUGAAUGUU | No. 5014 | AACAUUCAAAAACUGCUGUGUCC |
| BH0563 | No. 4313 | CACAGCAGUUUUUGAAUGUUU | No. 5015 | AAACAUUCAAAAACUGCUGUGUC |
| BH0564 | No. 4314 | ACAGCAGUUUUUGAAUGUUUG | No. 5016 | CAAACAUUCAAAAACUGCUGUGU |
| BH0565 | No. 4315 | CAGCAGUUUUUGAAUGUUUGC | No. 5017 | GCAAACAUUCAAAAACUGCUGUG |
| BH0567 | No. 4316 | GCAGUUUUUGAAUGUUUGCCA | No. 5018 | UGGCAAACAUUCAAAAACUGCUG |
| BH0568 | No. 4317 | CAGUUUUUGAAUGUUUGCCAC | No. 5019 | GUGGCAAACAUUCAAAAACUGCU |
| BH0570 | No. 4318 | GUUUUUGAAUGUUUGCCACAA | No. 5020 | UUGUGGCAAACAUUCAAAAACUG |
| BH0572 | No. 4319 | UUUUGAAUGUUUGCCACAACA | No. 5021 | UGUUGUGGCAAACAUUCAAAAAC |
| BH0573 | No. 4320 | UUUGAAUGUUUGCCACAACAU | No. 5022 | AUGUUGUGGCAAACAUUCAAAAA |

TABLE 2-9

| Double stranded | | Sense strand sequence | | Antisense strand sequence |
|---|---|---|---|---|
| nucleic acid No. | SEQ ID NO. | (5′→3′) | SEQ ID NO. | (5′→3′) |
| BH0574 | No. 4321 | UUGAAUGUUUGCCACAACAUG | No. 5023 | CAUGUUGUGGCAAACAUUCAAAA |
| BH0578 | No. 4322 | AUGUUUGCCACAACAUGCGAU | No. 5024 | AUCGCAUGUUGUGGCAAACAUUC |
| BH0582 | No. 4323 | UUGCCACAACAUGCGAUGUUU | No. 5025 | AAACAUCGCAUGUUGUGGCAAAC |
| BH0583 | No. 4324 | UGCCACAACAUGCGAUGUUUG | No. 5026 | CAAACAUCGCAUGUUGUGGCAAA |
| BH0585 | No. 4325 | CCACAACAUGCGAUGUUUGGA | No. 5027 | UCCAAACAUCGCAUGUUGUGGCA |
| BH0586 | No. 4326 | CACAACAUGCGAUGUUUGGAA | No. 5028 | UUCCAAACAUCGCAUGUUGUGGC |
| BH0588 | No. 4327 | CAACAUGCGAUGUUUGGAAAU | No. 5029 | AUUUCCAAACAUCGCAUGUUGUG |
| BH0590 | No. 4328 | ACAUGCGAUGUUUGGAAAUGA | No. 5030 | UCAUUUCCAAACAUCGCAUGUUG |
| BH0591 | No. 4329 | CAUGGGAUGUUUGGAAAUGAU | No. 5031 | AUCAUUUCCAAACAUCGCAUGUU |
| BH0592 | No. 4330 | AUGCGAUGUUUGGAAAUGAUA | No. 5032 | UAUCAUUUCCAAACAUCGCAUGU |
| BH0593 | No. 4331 | UGCGAUGUUUGGAAAUGAUAC | No. 5033 | GUAUCAUUUCCAAACAUCGCAUG |
| BH0594 | No. 4332 | GCGAUGUUUGGAAAUGAUACA | No. 5034 | UGUAUCAUUUCCAAACAUCGCAU |
| BH0595 | No. 4333 | CGAUGUUUGGAAAUGAUACAA | No. 5035 | UUGUAUCAUUUCCAAACAUCGCA |
| BH0597 | No. 4334 | AUGUUUGGAAAUGAUACAAUU | No. 5036 | AAUUGUAUCAUUUCCAAACAUCG |
| BH0598 | No. 4335 | UGUUUGGAAAUGAUACAAUUA | No. 5037 | UAAUUGUAUCAUUUCCAAACAUC |
| BH0601 | No. 4336 | UUGGAAAUGAUACAAUUACCU | No. 5038 | AGGUAAUUGUAUCAUUUCCAAAC |
| BH0607 | No. 4337 | AUGAUACAAUUACCUGGACGA | No. 5039 | UCGUGCAGGUAAUUGUAUCAUUU |
| BH0609 | No. 4338 | GAUACAAUUACCUGCACGACA | No. 5040 | UGUCGUGCAGGUAAUUGUAUCAU |
| BH0610 | No. 4339 | AUACAAUUACCUGCACGACAC | No. 5041 | GUGUCGUGCAGGUAAUUGUAUCA |
| BH0611 | No. 4340 | UACAAUUACCUGCACGACACA | No. 5042 | UGUGUCGUGCAGGUAAUUGUAUC |
| BH0612 | No. 4341 | ACAAUUACCUGCACGACACAU | No. 5043 | AUGUGUCGUGCAGGUAAUUGUAU |
| BH0616 | No. 4342 | UUACCUGCACGACACAUGGAA | No. 5044 | UUCCAUGUGUCGUGCAGGUAAUU |
| BH0617 | No. 4343 | UACCUGCACGACACAUGGAAA | No. 5045 | UUUCCAUGUGUCGUGCAGGUAAU |
| BH0618 | No. 4344 | ACCUGCACGACACAUGGAAAU | No. 5046 | AUUUCCAUGUGUCGUGCAGGUAA |
| BH0622 | No. 4345 | GCACGACACAUGGAAAUUGGA | No. 5047 | UCCAAUUUCCAUGUGUCGUGCAG |
| BH0624 | No. 4346 | ACGACACAUGGAAAUUGGACU | No. 5048 | AGUCCAAUUUCCAUGUGUCGUGC |
| BH0625 | No. 4347 | CGACACAUGGAAAUUGGACUA | No. 5049 | UAGUCCAAUUUCCAUGUGUCGUG |
| BH0627 | No. 4348 | ACACAUGGAAAUUGGACUAAA | No. 5050 | UUUAGUCCAAUUUCCAUGUGUCG |
| BH0628 | No. 4349 | CACAUGGAAAUUGGACUAAAU | No. 5051 | AUUUAGUCCAAUUUCCAUGUGUC |
| BH0629 | No. 4350 | ACAUGGAAAUUGGACUAAAUU | No. 5052 | AAUUUAGUCCAAUUUCCAUGUGU |
| BH0630 | No. 4351 | CAUGGAAAUUGGACUAAAUUA | No. 5053 | UAAUUUAGUCCAAUUUCCAUGUG |
| BH0631 | No. 4352 | AUGGAAAUUGGACUAAAUUAC | No. 5054 | GUAAUUUAGUCCAAUUUCCAUGU |
| BH0633 | No. 4353 | GGAAAUUGGACUAAAUUACCA | No. 5055 | UGGUAAUUUAGUCCAAUUUCCAU |
| BH0638 | No. 4354 | UUGGACUAAAUUACCAGAAUG | No. 5056 | CAUUCUGGUAAUUUAGUCCAAUU |
| BH0649 | No. 4355 | UACCAGAAUGCAGGGAAGUAA | No. 5057 | UUACUUCCCUGCAUUCUGGUAAU |
| BH0650 | No. 4356 | ACCAGAAUGCAGGGAAGUAAA | No. 5058 | UUUACUUCCCUGCAUUCUGGUAA |
| BH0651 | No. 4357 | CCAGAAUGCAGGGAAGUAAAA | No. 5059 | UUUUACUUCCCUGCAUUCUGGUA |
| BH0652 | No. 4358 | CAGAAUGCAGGGAAGUAAAAU | No. 5060 | AUUUUACUUCCCUGCAUUCUGGU |
| BH0653 | No. 4359 | AGAAUGCAGGGAAGUAAAAUG | No. 5061 | CAUUUUACUUCCCUGCAUUCUGG |
| BH0657 | No. 4360 | UGCAGGGAAGUAAAAUGCCCA | No. 5062 | UGGGCAUUUUACUUCCCUGCAUU |

TABLE 2-10

| Double stranded | | Sense stand sequence | | Antisense strand sequence |
|---|---|---|---|---|
| nucleic acid No. | SEQ ID NO. | (5′→3′) | SEQ ID NO. | (5′→3′) |
| BH0661 | No. 4361 | GGGAAGUAAAAUGCCCAUUCC | No. 5063 | GGAAUGGGCAUUUUACUUCCCUG |
| BH0664 | No. 4362 | AAGUAAAAUGCCCAUUCCCAU | No. 5064 | AUGGGAAUGGGCAUUUUACUUCC |
| BH0669 | No. 4363 | AAAUGCCCAUUCCCAUCAAGA | No. 5065 | UCUUGAUGGGAAUGGGCAUUUUA |
| BH0670 | No. 4364 | AAUGCCCAUUCCCAUCAAGAC | No. 5066 | GUCUUGAUGGGAAUGGGCAUUUU |
| BH0672 | No. 4365 | UGCCCAUUCCCAUCAAGACCA | No. 5067 | UGGUCUUGAUGGGAAUGGGCAUU |
| BH0673 | No. 4366 | GCCCAUUCCCAUCAAGACCAG | No. 5068 | CUGGUCUUGAUGGGAAUGGGCAU |
| BH0674 | No. 4367 | CCCAUUCCCAUCAAGACCAGA | No. 5069 | UCUGGUCUUGAUGGGAAUGGGCA |
| BH0678 | No. 4368 | UUCCCAUCAAGACCAGACAAU | No. 5070 | AUUGUCUGGUCUUGAUGGGAAUG |
| BH0679 | No. 4369 | UCCCAUCAAGACCAGACAAUG | No. 5071 | CAUUGUCUGGUCUUGAUGGGAAU |
| BH0680 | No. 4370 | CCCAUCAAGACCAGACAAUGG | No. 5072 | CCAUUGUCUGGUCUUGAUGGGAA |
| BH0681 | No. 4371 | CCAUCAAGACCAGACAAUGGA | No. 5073 | UCCAUUGUCUGGUCUUGAUGGGA |
| BH0682 | No. 4372 | CAUCAAGACCAGACAAUGGAU | No. 5074 | AUCCAUUGUCUGGUCUUGAUGGG |
| BH0683 | No. 4373 | AUCAAGACCAGACAAUGGAUU | No. 5075 | AAUCCAUUGUCUGGUCUUGAUGG |
| BH0684 | No. 4374 | UCAAGACCAGACAAUGGAUUU | No. 5076 | AAAUCCAUUGUCUGGUCUUGAUG |
| BH0685 | No. 4375 | CAAGACCAGACAAUGGAUUUG | No. 5077 | CAAAUCCAUUGUCUGGUCUUGAU |
| BH0687 | No. 4376 | AGACCAGACAAUGGAUUUGUG | No. 5078 | CACAAAUCCAUUGUCUGGUCUUG |
| BH0688 | No. 4377 | GACCAGACAAUGGAUUUGUGA | No. 5079 | UCACAAAUCCAUUGUCUGGUCUU |
| BH0689 | No. 4378 | ACCAGACAAUGGAUUUGUGAA | No. 5080 | UUCACAAAUCCAUUGUCUGGUCU |
| BH0690 | No. 4379 | CCAGACAAUGGAUUUGUGAAC | No. 5081 | GUUCACAAAUCCAUUGUCUGGUC |
| BH0692 | No. 4380 | AGACAAUGGAUUUGUGAACUA | No. 5082 | UAGUUCACAAAUCCAUUGUCUGG |
| BH0693 | No. 4381 | GACAAUGGAUUUGUGAACUAU | No. 5083 | AUAGUUCACAAAUCCAUUGUCUG |
| BH0694 | No. 4382 | ACAAUGGAUUUGUGAACUAUC | No. 5084 | GAUAGUUCACAAAUCCAUUGUCU |
| BH0697 | No. 4383 | AUGGAUUUGUGAACUAUCCUG | No. 5085 | CAGGAUAGUUCACAAAUCCAUUG |
| BH0699 | No. 4384 | GGAUUUGUGAACUAUCCUGCA | No. 5086 | UGCAGGAUAGUUCACAAAUCCAU |
| BH0700 | No. 4385 | GAUUUGUGAACUAUCCUGCAA | No. 5087 | UUGCAGGAUAGUUCACAAAUCCA |
| BH0701 | No. 4386 | AUUUGUGAACUAUCCUGCAAA | No. 5088 | UUUGCAGGAUAGUUCACAAAUCC |
| BH0702 | No. 4387 | UUUGUGAACUAUCCUGCAAAA | No. 5089 | UUUUGCAGGAUAGUUCACAAAUC |
| BH0705 | No. 4388 | GUGAACUAUCCUGCAAAACCA | No. 5090 | UGGUUUUGCAGGAUAGUUCACAA |
| BH0706 | No. 4389 | UGAACUAUCCUGCAAAACCAA | No. 5091 | UUGGUUUUGCAGGAUAGUUCACA |
| BH0708 | No. 4390 | AACUAUCCUGCAAAACCAACA | No. 5092 | UGUUGGUUUUGCAGGAUAGUUCA |
| BH0709 | No. 4391 | ACUAUCCUGCAAAACCAACAC | No. 5093 | GUGUUGGUUUUGCAGGAUAGUUC |
| BH0711 | No. 4392 | UAUCCUGCAAAACCAACACUU | No. 5094 | AAGUGUUGGUUUUGCAGGAUAGU |
| BH0712 | No. 4393 | AUCCUGCAAAACCAACACUUU | No. 5095 | AAAGUGUUGGUUUUGCAGGAUAG |
| BH0713 | No. 4394 | UCCUGCAAAACCAACACUUUA | No. 5096 | UAAAGUGUUGGUUUUGCAGGAUA |
| BH0714 | No. 4395 | CCUGCAAAACCAACACUUUAU | No. 5097 | AUAAAGUGUUGGUUUUGCAGGAU |
| BH0715 | No. 4396 | CUGCAAAACCAACACUUUAUU | No. 5098 | AAUAAAGUGUUGGUUUUGCAGGA |
| BH0716 | No. 4397 | UGCAAAACCAACACUUUAUUA | No. 5099 | UAAUAAAGUGUUGGUUUUCCAGG |
| BH0718 | No. 4398 | CAAAACCAACACUUUAUUACA | No. 5100 | UGUAAUAAAGUGUUGGUUUUGCA |
| BH0719 | No. 4399 | AAAACCAACACUUUAUUACAA | No. 5101 | UUGUAAUAAAGUGUUGGUUUUGC |
| BH0721 | No. 4400 | AACCAACACUUUAUUACAAGG | No. 5102 | CCUUGUAAUAAAGUGUUGGUUUU |

TABLE 2-11

| Double stranded | | Sense strand sequence | | Antisense strand sequence |
|---|---|---|---|---|
| nucleic acid No. | SEQ ID NO. | (5′→3′) | SEQ ID NO. | (5′→3′) |
| BH0723 | No. 4401 | CCAACACUUUAUUACAAGGAU | No. 5103 | AUCCUUGUAAUAAAGUGUUGGUU |
| BH0724 | No. 4402 | CAACACUUUAUUACAAGGAUA | No. 5104 | UAUCCUUGU UAAAGUGUUGGU |
| BH0725 | No. 4403 | AACACUUUAUUACAAGGAUAA | No. 5105 | UUAUCCUUGUAAUAAAGUGUUGG |
| BH0735 | No. 4404 | UACAAGGAUAAAGCCACAUUU | No. 5106 | AAAUGUGGCUUUAUCCUUGUAAU |
| BH0737 | No. 4405 | CAAGGAUAAAGCCACAUUUGG | No. 5107 | GCAAAUGUGGCUUUAUCCUUGUA |
| BH0739 | No. 4406 | AGGAUAAAGCCACAUUUGGCU | No. 5108 | AGCCAAAUGUGGCUUUAUCCUUG |
| BH0743 | No. 4407 | UAAAGCCACAUUUGGCUGCCA | No. 5109 | UGGCAGCCAAAUGUGGCUUUAUC |
| BH0744 | No. 4408 | AAAGCCACAUUUGGCUGCCAU | No. 5110 | AUGGCAGCCAAAUGUGGCUUUAU |
| BH0745 | No. 4409 | AAGCCACAUUUGGCUGCCAUG | No. 5111 | CAUGGCAGCCAAAUGUGGCUUUA |
| BH0746 | No. 4410 | AGCCACAUUUGGCUGCCAUGA | No. 5112 | UCAUGGCAGCCAAAUGUGGCUUU |
| BH0747 | No. 4411 | GCCACAUUUGGCUGCCAUGAU | No. 5113 | AUCAUGGCAGCCAAAUGUGGCUU |
| BH0748 | No. 4412 | CCACAUUUGGCUGCCAUGAUG | No. 5114 | CAUCAUGGCAGCCAAAUGUGGCU |
| BH0749 | No. 4413 | CACAUUUGGCUGCCAUGAUGG | No. 5115 | CCAUCAUGGCAGCCAAAUGUGGC |
| BH0750 | No. 4414 | ACAUUUGGCUGCCAUGAUGGA | No. 5116 | UCCAUCAUGGCAGCCAAAUGUGG |
| BH0753 | No. 4415 | UUUGGCUGCCAUGAUGGAUAU | No. 5117 | AUAUCCAUCAUGGCAGCCAAAUG |
| BH0754 | No. 4416 | UUGGCUGCCAUGAUGGAUAUU | No. 5118 | AAUAUCCAUCAUGGCAGCCAAAU |
| BH0756 | No. 4417 | GGCUGCCAUGAUGGAUAUUCU | No. 5119 | AGAAUAUCCAUCAUGGCAGCCAA |
| BH0757 | No. 4418 | GCUGCCAUGAUGGAUAUUCUC | No. 5120 | GAGAAUAUCCAUCAUGGCAGCCA |
| BH0759 | No. 4419 | UGCCAUGAUGGAUAUUCUCUG | No. 5121 | CAGAGAAUAUCCAUCAUGGCAGC |
| BH0760 | No. 4420 | GCCAUGAUGGAUAUUCUCUGG | No. 5122 | CCAGAGAAUAUCCAUCAUGGCAG |
| BH0762 | No. 4421 | CAUGAUGGAUAUUCUCUGGAU | No. 5123 | AUCCAGAGAAUAUCCAUCAUGGC |
| BH0763 | No. 4422 | AUGAUGGAUAUUCUCUGGAUG | No. 5124 | CAUCCAGAGAAUAUCCAUCAUGG |
| BH0766 | No. 4423 | AUGGAUAUUCUCUGGAUGGCC | No. 5125 | GGCCAUCCAGAGAAUAUCCAUCA |
| BH0771 | No. 4424 | UAUUCUCUGGAUGGCCCGGAA | No. 5126 | UUCCGGGCCAUCCAGAGAAUAUC |
| BH0773 | No. 4425 | UUCUCUGGAUGGCCCGGAAGA | No. 5127 | UCUUCCGGGCCAUCCAGAGAAUA |
| BH0774 | No. 4426 | UCUCUGGAUGGCCCGGAAGAA | No. 5128 | UUCUUCCGGGCCAUCCAGAGAAU |
| BH0775 | No. 4427 | CUCUGGAUGGCCCGGAAGAAA | No. 5129 | UUUCUUCCGGGCCAUCCAGAGAA |
| BH0776 | No. 4428 | UCUGGAUGGCCCGGAAGAAAU | No. 5130 | AUUUCUUCCGGGCCAUCCAGAGA |
| BH0777 | No. 4429 | CUGGAUGGCCCGGAAGAAAUA | No. 5131 | UAUUUCUUCCGGGCCAUCCAGAG |
| BH0779 | No. 4430 | GGAUGGCCCGGAAGAAAUAGA | No. 5132 | UCUAUUUCUUCCGGGCCAUCCAG |
| BH0780 | No. 4431 | GAUGGCCCGGAAGAAAUAGAA | No. 5133 | UUCUAUUUCUUCCGGGCCAUCCA |
| BH0781 | No. 4432 | AUGGCCCGGAAGAAAUAGAAU | No. 5134 | AUUCUAUUUCUUCCGGGCCAUCC |
| BH0782 | No. 4433 | UGGCCCGGAAGAAAUAGAAUG | No. 5135 | CAUUCUAUUUCUUCCGGGCCAUC |
| BH0783 | No. 4434 | GGCCCGGAAGAAAUAGAAUGU | No. 5136 | ACAUUCUAUUUCUUCCGGGCCAU |
| BH0785 | No. 4435 | CCCGGAAGAAAUAGAAUGUAC | No. 5137 | GUACAUUCUAUUUCUUCCGGGCC |
| BH0786 | No. 4436 | CCGGAAGAAAUAGAAUGUACC | No. 5138 | GGUACAUUCUAUUUCUUCCGGGC |
| BH0787 | No. 4437 | CGGAAGAAAUAGAAUGUACCA | No. 5139 | UGGUACAUUCUAUUUCUUCCGGG |
| BH0790 | No. 4438 | AAGAAAUAGAAUGUACCAAAC | No. 5140 | GUUUGGUACAUUCUAUUUCUUCC |
| BH0795 | No. 4439 | AUAGAAUGUACCAAACUGGGA | No. 5141 | UCCCAGUUUGGUACAUUCUAUUU |
| BH0796 | No. 4440 | UAGAAUGUACCAAACUGGGAA | No. 5142 | UUCCCAGUUUGGUACAUUCUAUU |

TABLE 2-12

| Double stranded | | Sense strand sequence | | Annsense strand sequence |
|---|---|---|---|---|
| nucleic acid No. | SEQ ID NO. | (5′→3′) | SEQ ID NO. | (5′→3′) |
| BH0797 | No. 4441 | AGAAUGUACCAAACUGGGAAA | No. 5143 | UUUCCCAGUUUGGUACAUUCUAU |
| BH0800 | No. 4442 | AUGUACCAAACUGGGAAACUG | No. 5144 | CAGUUUCCCAGUUUGGUACAUUC |
| BH0804 | No. 4443 | ACCAAACUGGGAAACUGGUCU | No. 5145 | AGACCAGUUUCCCAGUUUGGUAC |
| BH0805 | No. 4444 | CCAAACUGGGAAACUGGUCUG | No. 5146 | CAGACCAGUUUCCCAGUUUGGUA |
| BH0808 | No. 4445 | AACUGGGAAACUGGUCUGCCA | No. 5147 | UGGCAGACCAGUUUCCCAGUUUG |
| BH0809 | No. 4446 | ACUGGGAAACUGGUCUGCCAU | No. 5148 | AUGGCAGACCAGUUUCCCAGUUU |
| BH0810 | No. 4447 | CUGGGAAACUGGUCUGCCAUG | No. 5149 | CAUGGCAGACCAGUUUCCCAGUU |
| BH0811 | No. 4448 | UGGGAAACUGGUCUGCCAUGC | No. 5150 | GCAUGGCAGACCAGUUUCCCAGU |
| BH0813 | No. 4449 | GGAAACUGGUCUGCCAUGCCA | No. 5151 | UGGCAUGGCAGACCAGUUUCCCA |
| BH0814 | No. 4450 | GAAACUGGUCUGCCAUGCCAA | No. 5152 | UUGGCAUGGCAGACCAGUUUCCC |
| BH0815 | No. 4451 | AAACUGGUCUGCCAUGCCAAG | No. 5153 | CUUGGCAUGGCAGACCAGUUUCC |
| BH0816 | No. 4452 | AACUGGUCUGCCAUGCCAAGU | No. 5154 | ACUUGGCAUGGCAGACCAGUUUC |
| BH0817 | No. 4453 | ACUGGUCUGCCAUGCCAAGUU | No. 5165 | AACUUGGCAUGGCAGACCAGUUU |
| BH0818 | No. 4454 | CUGGUCUGCCAUGCCAAGUUG | No. 5156 | CAACUUGGCAUGGCAGACCAGUU |
| BH0819 | No. 4455 | UGGUCUGCCAUGCCAAGUUGU | No. 5157 | ACAACUUGGCAUGGCAGACCAGU |
| BH0820 | No. 4456 | GGUCUGCCAUGCCAAGUUGUA | No. 5158 | UACAACUUGGCAUGGCAGACCAG |
| BH0821 | No. 4457 | GUCUGCCAUGCCAAGUUGUAA | No. 5158 | UUACAACUUGGCAUGGCAGACCA |
| BH0822 | No. 4458 | UCUGCCAUGCCAAGUUGUAAA | No. 5160 | UUUACAACUUGGCAUGGCAGACC |
| BH0823 | No. 4459 | CUGCCAUGCCAAGUUGUAAAG | No. 5161 | CUUUACAACUUGGCAUGGCAGAC |
| BH0825 | No. 4460 | GCCAUGCCAAGUUGUAAAGCA | No. 5162 | UGCUUUACAACUUGGCAUGGCAG |
| BH0826 | No. 4461 | CCAUGCCAAGUUGUAAAGCAU | No. 5163 | AUGCUUUACAACUUGGCAUGGCA |
| BH0827 | No. 4462 | CAUGCCAAGUUGUAAAGCAUC | No. 5164 | GAUGCUUUACAACUUGGCAUGGC |
| BH0828 | No. 4463 | AUGCCAAGUUGUAAAGCAUCU | No. 5165 | AGAUGCUUUACAACUUGGCAUGG |
| BH0829 | No. 4464 | UGCCAAGUUGUAAAGCAUCUU | No. 5166 | AAGAUGCUUUACAACUUGGCAUG |
| BH0830 | No. 4465 | GCCAAGUUGUAAAGCAUCUUG | No. 5167 | CAAGAUGCUUUACAACUUGGCAU |
| BH0831 | No. 4466 | CCAAGUUGUAAAGCAUCUUGU | No. 5168 | ACAAGAUGCUUUACAACUUGGCA |
| BH0832 | No. 4467 | CAAGUUGUAAAGCAUCUUGUA | No. 5169 | UACAAGAUGCUUUACAACUUGGC |
| BH0833 | No. 4468 | AAGUUGUAAAGCAUCUUGUAA | No. 5170 | UUACAAGAUGCUUUACAACUUGG |
| BH0834 | No. 4469 | AGUUGUAAAGCAUCUUGUAAA | No. 5171 | UUUACAAGAUGCUUUACAACUUG |
| BH0835 | No. 4470 | GUUGUAAAGCAUCUUGUAAAG | No. 5172 | CUUUACAAGAUGCUUUACAACUU |
| BH0837 | No. 4471 | UGUAAAGCAUCUUGUAAAGUA | No. 5173 | UACUUUACAAGAUGCUUUACAAC |
| BH0838 | No. 4472 | GUAAAGCAUCUUGUAAAGUAC | No. 5174 | GUACUUUACAAGAUGCUUUACAA |
| BH0840 | No. 4473 | AAAGCAUCUUGUAAAGUACCU | No. 5175 | AGGUACUUUACAAGAUGCUUUAC |
| BH0842 | No. 4474 | AGCAUCUUGUAAAGUACCUGU | No. 5176 | ACAGGUACUUUACAAGAUGCUUU |
| BH0845 | No. 4475 | AUCUUGUAAAGUACCUGUGAA | No. 5177 | UUCACAGGUACUUUACAAGAUGC |
| BH0846 | No. 4476 | UCUUGUAAAGUACCUGUGAAA | No. 5178 | UUUCACAGGUACUUUACAAGAUG |
| BH0847 | No. 4477 | CUUGUAAAGUACCUGUGAAAA | No. 5179 | UUUUCACAGGUACUUUACAAGAU |
| BH0852 | No. 4478 | AAAGUACCUGUGAAAAAAGCC | No. 5180 | GGCUUUUUUCACAGGUACUUUAC |
| BH0853 | No. 4479 | AAGUACCUGUGAAAAAAGCCA | No. 5181 | UGGCUUUUUUCACAGGUACUUUA |
| BH0854 | No. 4480 | AGUACCUGUGAAAAAAGCCAC | No. 5182 | GUGGCUUUUUUCACAGGUACUUU |

TABLE 2-13

| Double stranded | | Sense strand sequence | | Anttserise strand sequence |
|---|---|---|---|---|
| nucleic acid No. | SEQ ID NO. | (5′→3′) | SEQ ID NO. | (5′→3′) |
| BH0855 | No. 4481 | GUACCUGUGAAAAAAGCCACU | No.5183 | AGUGGCUUUUUUCACAGGUACUU |
| BH0857 | No. 4482 | ACCUGUGAAAAAAGCCACUGU | No. 6184 | ACAGUGGCUUUUUUCACAGGUAC |
| BH0858 | No. 4483 | CCUGUGAAAAAAGCCACUGUG | No. 5185 | CACAGUGGCUUUUUUCACAGGUA |
| BH0859 | No. 4484 | CUGUGAAAAAAGCCACUGUGG | No. 5186 | CCACAGUGGCUUUUUUCACAGGU |
| BH0860 | No. 4485 | UGUGAAAAAAGCCACUGUGGU | No. 5187 | ACCACAGUGGCUUUUUUCACAGG |
| BH0861 | No. 4486 | GUGAAAAAAGCCACUGUGGUG | No. 5188 | CACCACAGUGGCUUUUUUCACAG |
| BH0863 | No. 4487 | GAAAAAAGCCACUGUGGUGUA | No. 5189 | UACACCACAGUGGCUUUUUUCAC |
| BH0864 | No. 4488 | AAAAAAGCCACUGUGGUGUAC | No. 5190 | GUACACCACAGUGGCUUUUUUCA |
| BH0866 | No. 4489 | AAAAGCCACUGUGGUGUACCA | No. 5191 | UGGUACACCACAGUGGCUUUUUU |
| BH0867 | No. 4490 | AAAGCCACUGUGGUGUACCAA | No. 5192 | UUGGUACACCACAGUGGCUUUUU |
| BH0868 | No. 4491 | AAGCCACUGUGGUGUACCAAG | No. 5193 | CUUGGUACACCACAGUGGCUUUU |
| BH0870 | No. 4492 | GCCACUGUGGUGUACCAAGGA | No. 5194 | UCCUUGGUACACCACAGUGGCUU |
| BH0872 | No. 4493 | CACUGUGGUGUACCAAGGAGA | No. 5195 | UCUCCUUGGUACACCACAGUGGC |
| BH0873 | No. 4494 | ACUGUGGUGUACCAAGGAGAG | No. 5196 | CUCUCCUUGGUACACCACAGUGG |
| BH0874 | No. 4495 | CUGUGGUGUACCAAGGAGAGA | No. 5197 | UCUCUCCUUGGUACACCACAGUG |
| BH0875 | No. 4496 | UGUGGUGUACCAAGGAGAGAG | No. 5198 | CUCUCUCCUUGGUACACCACAGU |
| BH0876 | No. 4497 | GUGGUGUACCAAGGAGAGAGA | No. 5199 | UCUCUCUCCUUGGUACACCACAG |
| BH0877 | No. 4498 | UGGUGUACCAAGGAGAGAGAG | No. 5200 | CUCUCUCUCCUUGGUACACCACA |
| BH0879 | No. 4499 | GUGUACCAAGGAGAGAGAGUA | No. 5201 | UACUCUCUCUCCUUGGUACACCA |
| BH0880 | No. 4500 | UGUACCAAGGAGAGAGAGUAA | No. 5202 | UUACUCUCUCUCCUUGGUACACC |
| BH0881 | No. 4501 | GUACCAAGGAGAGAGAGUAAA | No. 5203 | UUUACUCUCUCUCCUUGGUACAC |
| BH0882 | No. 4502 | UACCAAGGAGAGAGAGUAAAG | No. 5204 | CUUUACUCUCUCUCCUUGGUACA |
| BH0883 | No. 4503 | ACCAAGGAGAGAGAGUAAAGA | No. 5205 | UCUUUACUCUCUCUCCUUGGUAC |
| BH0884 | No. 4504 | CCAAGGAGAGAGAGUAAAGAU | No. 5206 | AUCUUUACUCUCUCUCCUUGGUA |
| BH0885 | No. 4505 | CAAGGAGAGAGAGUAAAGAUU | No. 5207 | AAUCUUUACUCUCUCUCCUUGGU |
| BH0886 | No. 4506 | AAGGAGAGAGAGUAAAGAUUC | No. 5208 | GAAUCUUUACUCUCUCUCCUUGG |
| BH0887 | No. 4507 | AGGAGAGAGAGUAAAGAUUCA | No. 5209 | UGAAUCUUUACUCUCUCUCCUUG |
| BH0888 | No. 4508 | GGAGAGAGAGUAAAGAUUCAG | No. 5210 | CUGAAUCUUUACUCUCUCUCCUU |
| BH0890 | No. 4509 | AGAGAGAGUAAAGAUUCAGGA | No. 5211 | UCCUGAAUCUUUACUCUCUCUCC |
| BH0891 | No. 4510 | GAGAGAGUAAAGAUUCAGGAA | No. 5212 | UUCCUGAAUCUUUACUCUCUCUC |
| BH0892 | No. 4511 | AGAGAGUAAAGAUUCAGGAAA | No. 5213 | UUUCCUGAAUCUUUACUCUCUCU |
| BH0893 | No. 4512 | GAGAGUAAAGAUUCAGGAAAA | No. 5214 | UUUUCCUGAAUCUUUACUCUCUC |
| BH0894 | No. 4513 | AGAGUAAAGAUUCAGGAAAAA | No. 5216 | UUUUUCCUGAAUCUUUACUCUCU |
| BH0895 | No. 4514 | GAGUAAAGAUUCAGGAAAAAU | No. 5216 | AUUUUUCCUGAAUCUUUACUCUC |
| BH0896 | No. 4516 | AGUAAAGAUUCAGGAAAAAUU | No. 5217 | AAUUUUUCCUGAAUCUUUACUCU |
| BH0897 | No. 4516 | GUAAAGAUUCAGGAAAAAUUU | No. 5218 | AAAUUUUUCCUGAAUCUUUACUC |
| BH0898 | No. 4517 | UAAAGAUUCAGGAAAAAUUUA | No. 5219 | UAAAUUUUUCCUGAAUCUUUACU |
| BH0899 | No. 4518 | AAAGAUUCAGGAAAAAUUUAA | No. 5220 | UUAAAUUUUUCCUGAAUCUUUAC |
| BH0905 | No. 4619 | UCAGGAAAAAUUUAAGAAUGG | No. 5221 | CCAUUCUUAAAUUUUUCCUGAAU |
| BH0906 | No. 4520 | CAGGAAAAAUUUAAGAAUGGA | No. 5222 | UCCAUUCUUAAAUUUUUCCUGAA |

TABLE 2-14

| Double stranded | | Sense strand sequence | | Antisense strand sequence |
|---|---|---|---|---|
| nucleic acid No. | SEQ ID NO. | (5′→3′) | SEQ ID NO. | (5′→3′) |
| BH0907 | No. 4521 | AGGAAAAAUUUAAGAAUGGAA | No. 5223 | UUCCAUUCUUAAAUUUUUCCUGA |
| BH0912 | No. 4522 | AAAUUUAAGAAUGGAAUGCUA | No. 5224 | UAGCAUUCCAUUCUUAAAUUUUU |
| BH0914 | No. 4523 | AUUUAAGAAUGGAAUGCUACA | No. 5225 | UGUAGCAUUCCAUUCUUAAAUUU |
| BH0917 | No. 4524 | UAAGAAUGGAAUGCUACAUGG | No. 5226 | CCAUGUAGCAUUCCAUUCUUAAA |
| BH0918 | No. 4525 | AAGAAUGGAAUGCUACAUGGU | No. 5227 | ACCAUGUAGCAUUCCAUUCUUAA |
| BH0919 | No. 4626 | AGAAUGGAAUGCUACAUGGUG | No. 5228 | CACCAUGUAGCAUUCCAUUCUUA |
| BH0920 | No. 4527 | GAAUGGAAUGCUACAUGGUGA | No. 5229 | UCACCAUGUAGCAUUCCAUUCUU |
| BH0921 | No. 4528 | AAUGGAAUGCUACAUGGUGAU | No. 5230 | AUCACCAUGUAGCAUUCCAUUCU |
| BH0922 | No. 4529 | AUGGAAUGCUACAUGGUGAUA | No. 5231 | UAUCACCAUGUAGCAUUCCAUUC |
| BH0923 | No. 4530 | UGGAAUGCUACAUGGUGAUAA | No. 5232 | UUAUCACCAUGUAGCAUUCCAUU |
| BH0924 | No. 4531 | GGAAUGCUACAUGGUGAUAAA | No. 5233 | UUUAUCACCAUGUAGCAUUCCAU |
| BH0926 | No. 4532 | AAUGCUACAUGGUGAUAAAGU | No. 5234 | ACUUUAUCACCAUGUAGCAUUCC |
| BH0927 | No. 4533 | AUGCUACAUGGUGAUAAAGUU | No. 5235 | AACUUUAUCACCAUGUAGCAUUC |
| BH0928 | No. 4534 | UGCUACAUGGUGAUAAAGUUU | No. 5236 | AAACUUUAUCACCAUGUAGCAUU |
| BH0930 | No. 4535 | CUACAUGGUGAUAAAGUUUCU | No. 5237 | AGAAACUUUAUCACCAUGUAGCA |
| BH0932 | No. 4536 | ACAUGGUGAUAAAGUUUCUUU | No. 5238 | AAAGAAACUUUAUCACCAUGUAG |
| BH0934 | No. 4537 | AUGGUGAUAAAGUUUCUUUCU | No. 5239 | AGAAAGAAACUUUAUCACCAUGU |
| BH0935 | No. 4538 | UGGUGAUAAAGUUUCUUUCUU | No. 5240 | AAGAAAGAAACUUUAUCACCAUG |
| BH0936 | No. 4539 | GGUGAUAAAGUUUCUUUCUUC | No. 5241 | GAAGAAAGAAACUUUAUCACCAU |
| BH0937 | No. 4540 | GUGAUAAAGUUUCUUUCUUCU | No. 5242 | AGAAGAAAGAAACUUUAUCACCA |
| BH0940 | No. 4541 | AUAAAGUUUCUUUCUUCUGCA | No. 5243 | UGCAGAAGAAAGAAACUUUAUCA |
| BH0941 | No. 4542 | UAAAGUUUCUUUCUUCUGCAA | No. 5244 | UUGCAGAAGAAAGAAACUUUAUC |
| BH0942 | No. 4543 | AAAGUUUCUUUCUUCUGCAAA | No. 5245 | UUUGCAGAAGAAAGAAACUUUAU |
| BH0943 | No. 4544 | AAGUUUCUUUCUUCUGCAAAA | No. 5246 | UUUUGCAGAAGAAAGAAACUUUA |
| BH0944 | No. 4545 | AGUUUCUUUCUUCUGCAAAAA | No. 5247 | UUUUUGCAGAAGAAAGAAACUUU |
| BH0945 | No. 4546 | GUUUCUUUCUUCUGCAAAAAU | No. 5248 | AUUUUUGCAGAAGAAAGAAACUU |
| BH0946 | No. 4547 | UUUCUUUCUUCUGCAAAAAUA | No. 5249 | UAUUUUUGCAGAAGAAAGAAACU |
| BH0947 | No. 4548 | UUCUUUCUUCUGCAAAAAUAA | No. 5250 | UUAUUUUUGCAGAAGAAAGAAAC |
| BH0948 | No. 4549 | UCUUUCUUCUGCAAAAAUAAG | No. 5251 | CUUAUUUUUGCAGAAGAAAGAAA |
| BH0953 | No. 4550 | CUUCUGCAAAAAUAAGGAAAA | No. 5252 | UUUUCCUUAUUUUUGCAGAAGAA |
| BH0955 | No. 4551 | UCUGCAAAAAUAAGGAAAAGA | No. 5253 | UCUUUUCCUUAUUUUUGCAGAAG |
| BH0956 | No. 4552 | CUGCAAAAAUAAGGAAAAGAA | No. 5254 | UUCUUUUCCUUAUUUUUGCAGAA |
| BH0957 | No. 4553 | UGCAAAAAUAAGGAAAAGAAG | No. 5255 | CUUCUUUUCCUUAUUUUUGCAGA |
| BH0964 | No. 4554 | AUAAGGAAAAGAAGUGUAGCU | No. 5256 | AGCUACACUUCUUUUCCUUAUUU |
| BH0965 | No. 4555 | UAAGGAAAAGAAGUGUAGCUA | No. 5257 | UAGCUACACUUCUUUUCCUUAUU |
| BH0966 | No. 4556 | AAGGAAAAGAAGUGUAGCUAU | No. 5258 | AUAGCUACACUUCUUUUCCUUAU |
| BH0967 | No. 4557 | AGGAAAAGAAGUGUAGCUAUA | No. 5259 | UAUAGCUACACUUCUUUUCCUUA |
| BH0969 | No. 4558 | GAAAAGAAGUGUAGCUAUACA | No. 5260 | UGUAUAGCUACACUUCUUUUCCU |
| BH0972 | No. 4559 | AAGAAGUGUAGCUAUACAGAG | No. 5261 | CUCUGUAUAGCUACACUUCUUUU |
| BH0974 | No. 4560 | GAAGUGUAGCUAUACAGAGGA | No. 5262 | UCCUCUGUAUAGCUACACUUCUU |

TABLE 2-15

| Double stranded | | Sense strand sequence | | Antisense strand sequence |
|---|---|---|---|---|
| nucleic acid No. | SEQ ID NO. | (5′→3′) | SEQ ID NO. | (5′→3′) |
| BH0975 | No. 4561 | AAGUGUAGCUAUACAGAGGAU | No. 5263 | AUCCUCUGUAUAGCUACACUUCU |
| BH0977 | No. 4562 | GUGUAGCUAUACAGAGGAUGC | No. 5264 | GCAUCCUCUGUAUAGCUACACUU |
| BH0978 | No. 4563 | UGUAGCUAUACAGAGGAUGCU | No. 5265 | AGCAUCCUCUGUAUAGCUACACU |
| BH0980 | No. 4564 | UAGCUAUACAGAGGAUGCUCA | No. 5266 | UGAGCAUCCUCUGUAUAGCUACA |
| BH0981 | No. 4565 | AGCUAUACAGAGGAUGCUCAG | No. 5267 | CUGAGCAUCCUCUGUAUAGCUAC |
| BH0985 | No. 4566 | AUACAGAGGAUGCUCAGUGUA | No. 5268 | UACACUGAGCAUCCUCUGUAUAG |
| BH0987 | No. 4567 | ACAGAGGAUGCUCAGUGUAUA | No. 5269 | UAUACACUGAGCAUCCUCUGUAU |
| BH0988 | No. 4568 | CAGAGGAUGCUCAGUGUAUAG | No. 5270 | CUAUACACUGAGCAUCCUCUGUA |
| BH0989 | No. 4569 | AGAGGAUGCUCAGUGUAUAGA | No. 5271 | UCUAUACACUGAGCAUCCUCUGU |
| BH0990 | No. 4570 | GAGGAUGCUCAGUGUAUAGAU | No. 5272 | AUCUAUACACUGAGCAUCCUCUG |
| BH0991 | No. 4571 | AGGAUGCUCAGUGUAUAGAUG | No. 5273 | CAUCUAUACACUGAGCAUCCUCU |
| BH0996 | No. 4572 | GCUCAGUGUAUAGAUGGCACU | No. 5274 | AGUGCCAUCUAUACACUGAGCAU |
| BH0997 | No. 4573 | CUCAGUGUAUAGAUGGCACUA | No. 5275 | UAGUGCCAUCUAUACACUGAGCA |
| BH0998 | No. 4574 | UCAGUGUAUAGAUGGCACUAU | No. 5276 | AUAGUGCCAUCUAUACACUGAGC |
| BH0999 | No. 4575 | CAGUGUAUAGAUGGCACUAUC | No. 5277 | GAUAGUGCCAUCUAUACACUGAG |
| BH1000 | No. 4576 | AGUGUAUAGAUGGCACUAUCG | No. 5278 | CGAUAGUGCCAUCUAUACACUGA |
| BH1001 | No. 4577 | GUGUAUAGAUGGCACUAUCGA | No. 5279 | UCGAUAGUGCCAUCUAUACACUG |
| BH1002 | No. 4578 | UGUAUAGAUGGCACUAUCGAA | No. 5280 | UUCGAUAGUGCCAUCUAUACACU |
| BH1003 | No. 4579 | GUAUAGAUGGCACUAUCGAAG | No. 5281 | CUUCGAUAGUGCCAUCUAUACAC |
| BH1005 | No. 4580 | AUAGAUGGCACUAUCGAAGUC | No. 5282 | GACUUCGAUAGUGCCAUCUAUAC |
| BH1007 | No. 4581 | AGAUGGCACUAUCGAAGUCCC | No. 5283 | GGGACUUCGAUAGUGCCAUCUAU |
| BH1009 | No. 4582 | AUGGCACUAUCGAAGUCCCCA | No. 5284 | UGGGGACUUCGAUAGUGCCAUCU |
| BH1010 | No. 4583 | UGGCACUAUCGAAGUCCCCAA | No. 5285 | UUGGGGACUUCGAUAGUGCCAUC |
| BH1011 | No. 4584 | GGCACUAUCGAAGUCCCCAAA | No. 5286 | UUUGGGGACUUCGAUAGUGCCAU |
| BH1013 | No. 4585 | CACUAUCGAAGUCCCCAAAUG | No. 5287 | CAUUUGGGGACUUCGAUAGUGCC |
| BH1015 | No. 4586 | CUAUCGAAGUCCCCAAAUGCU | No. 5288 | AGCAUUUGGGGACUUCGAUAGUG |
| BH1016 | No. 4587 | UAUCGAAGUCCCCAAAUGCUU | No. 5289 | AAGCAUUUGGGGACUUCGAUAGU |
| BH1017 | No. 4588 | AUCGAAGUCCCCAAAUGCUUC | No. 5290 | GAAGCAUUUGGGGACUUCGAUAG |
| BH1018 | No. 4589 | UCGAAGUCCCCAAAUGCUUCA | No. 5291 | UGAAGCAUUUGGGGACUUCGAUA |
| BH1021 | No. 4590 | AAGUCCCCAAAUGCUUCAAGG | No. 5292 | CCUUGAAGCAUUUGGGGACUUCG |
| BH1022 | No. 4591 | AGUCCCCAAAUGCUUCAAGGA | No. 5293 | UCCUUGAAGCAUUUGGGGACUUC |
| BH1023 | No. 4592 | GUCCCCAAAUGCUUCAAGGAA | No. 5294 | UUCCUUGAAGCAUUUGGGGACUU |
| BH1024 | No. 4593 | UCCCCAAAUGCUUCAAGGAAC | No. 5295 | GUUCCUUGAAGCAUUUGGGGACU |
| BH1025 | No. 4594 | CCCCAAAUGCUUCAAGGAACA | No. 5296 | UGUUCCUUGAAGCAUUUGGGGAC |
| BH1026 | No. 4595 | CCCAAAUGCUUCAAGGAACAC | No. 5297 | GUGUUCCUUGAAGCAUUUGGGGA |
| BH1027 | No. 4596 | CCAAAUCCUUCAAGGAACACA | No. 5298 | UGUGUUCCUUGAAGCAUUUGGGG |
| BH1028 | No. 4597 | CAAAUCCUUCAAGGAACACAG | No. 5299 | CUGUGUUCCUUGAAGCAUUUGGG |
| BH1029 | No. 4598 | AAAUGCUUCAAGGAACACAGU | No. 5300 | ACUGUGUUCCUUGAAGCAUUUGG |
| BH1030 | No. 4599 | AAUGCUUCAAGGAACACAGUU | No. 5301 | AACUGUGUUCCUUGAAGCAUUUG |
| BH1031 | No. 4600 | AUGCUUCAAGGAACACAGUUC | No. 5302 | GAACUGUGUUCCUUGAAGCAUUU |

TABLE 2-16

| Double stranded | | Sense strand sequence | | Antisense strand sequence |
|---|---|---|---|---|
| nucleic acid No. | SEQ ID NO. | (5′→3′) | SEQ ID NO. | (5′→3′) |
| BH1032 | No. 4601 | UGCUUCAAGGAACACAGUUCU | No. 5303 | AGAACUGUGUUCCUUGAAGCAUU |
| BH1034 | No. 4602 | CUUCAAGGAACACAGUUCUCU | No. 5304 | AGAGAACUGUGUUCCUUGAAGCA |
| BH1035 | No. 4603 | UUCAAGGAACACAGUUCUCUG | No. 5305 | CAGAGAACUGUGUUCCUUGAAGC |
| BH1038 | No. 4604 | AAGGAACACAGUUCUCUGGCU | No. 5306 | AGCCAGAGAACUGUGUUCCUUGA |
| BH1039 | No. 4605 | AGGAACACAGUUCUCUGGCUU | No. 5307 | AAGCCAGAGAACUGUGUUCCUUG |
| BH1040 | No. 4606 | GGAACACAGUUCUCUGGCUUU | No. 5308 | AAAGCCAGAGAACUGUGUUCCUU |
| BH1041 | No. 4607 | GAACACAGUUCUCUGGCUUUU | No. 5309 | AAAAGCCAGAGAACUGUGUUCCU |
| BH1042 | No. 4608 | AACACAGUUCUCUGGCUUUUU | No. 5310 | AAAAAGCCAGAGAACUGUGUUCC |
| BH1043 | No. 4609 | ACACAGUUCUCUGGCUUUUUG | No. 5311 | CAAAAAGCCAGAGAACUGUGUUC |
| BH1044 | No. 4610 | CACAGUUCUCUGGCUUUUUGG | No. 5312 | CCAAAAAGCCAGAGAACUGUGUU |
| BH1045 | No. 4611 | ACAGUUCUCUGGCUUUUUGGA | No. 5313 | UCCAAAAAGCCAGAGAACUGUGU |
| BH1046 | No. 4612 | CAGUUCUCUGGCUUUUUGGAA | No. 5314 | UUCCAAAAAGCCAGAGAACUGUG |
| BH1047 | No. 4613 | AGUUCUCUGGCUUUUUGGAAA | No. 5315 | UUUCCAAAAAGCCAGAGAACUGU |
| BH1048 | No. 4614 | GUUCUCUGGCUUUUUGGAAAA | No. 5316 | UUUUCCAAAAAGCCAGAGAACUG |
| BH1051 | No. 4615 | CUCUGGCUUUUUGGAAAACUG | No. 5317 | CAGUUUUCCAAAAAGCCAGAGAA |
| BH1052 | No. 4616 | UCUGGCUUUUUGGAAAACUGA | No. 5318 | UCAGUUUUCCAAAAAGCCAGAGA |
| BH1053 | No. 4617 | CUGGCUUUUUGGAAAACUGAU | No. 5319 | AUCAGUUUUCCAAAAAGCCAGAG |
| BH1054 | No. 4618 | UGGCUUUUUGGAAAACUGAUG | No. 5320 | CAUCAGUUUUCCAAAAAGCCAGA |
| BH1056 | No. 4619 | GCUUUUUGGAAAACUGAUGCA | No. 5321 | UGCAUCAGUUUUCCAAAAAGCCA |
| BH1057 | No. 4620 | CUUUUUGGAAAACUGAUGCAU | No. 5322 | AUGCAUCAGUUUUCCAAAAAGCC |
| BH1061 | No. 4621 | UUGGAAAACUGAUGCAUCCGA | No. 5323 | UCGGAUGCAUCAGUUUUCCAAAA |
| BH1062 | No. 4622 | UGGAAAACUGAUGCAUCCGAU | No. 5324 | AUCGGAUGCAUCAGUUUUCCAAA |
| BH1063 | No. 4623 | GGAAAACUGAUGCAUCCGAUG | No. 5325 | CAUCGGAUGCAUCAGUUUUCCAA |
| BH1064 | No. 4624 | GAAAACUGAUGCAUCCGAUGU | No. 5326 | ACAUCGGAUGCAUCAGUUUUCCA |
| BH1065 | No. 4625 | AAAACUGAUGCAUCCGAUGUA | No. 5327 | UACAUCGGAUGCAUCAGUUUUCC |
| BH1067 | No. 4626 | AACUGAUGCAUCCGAUGUAAA | No. 5328 | UUUACAUCGGAUGCAUCAGUUUU |
| BH1068 | No. 4627 | ACUGAUGCAUCCGAUGUAAAG | No. 5329 | CUUUACAUCGGAUGCAUCAGUUU |
| BH1072 | No. 4628 | AUGCAUCCGAUGUAAAGCCAU | No. 5330 | AUGGCUUUACAUCGGAUGCAUCA |
| BH1073 | No. 4629 | UGCAUCCGAUGUAAAGCCAUG | No. 5331 | CAUGGCUUUACAUCGGAUGCAUC |
| BH1076 | No. 4630 | AUCCGAUGUAAAGCCAUGCUA | No. 5332 | UAGCAUGGCUUUACAUCGGAUGC |
| BH1077 | No. 4631 | UCCGAUGUAAAGCCAUGCUAA | No. 5333 | UUAGCAUGGCUUUACAUCGGAUG |
| BH1078 | No. 4632 | CCGAUGUAAAGCCAUGCUAAG | No. 5334 | CUUAGCAUGGCUUUACAUCGGAU |
| BH1083 | No. 4633 | GUAAAGCCAUGCUAAGGUGGU | No. 5335 | ACCACCUUAGCAUGGCUUUACAU |
| BH1084 | No. 4634 | UAAAGCCAUGCUAAGGUGGUU | No. 5336 | AACCACCUUAGCAUGGCUUUACA |
| BH1085 | No. 4635 | AAAGCCAUGCUAAGGUGGUUU | No. 5337 | AAACCACCUUAGCAUGGCUUUAC |
| BH1086 | No. 4636 | AAGCCAUGCUAAGGUGGUUUU | No. 5338 | AAAACCACCUUAGCAUGGCUUUA |
| BH1087 | No. 4637 | AGCCAUGCUAAGGUGGUUUUC | No. 5339 | GAAAACCACCUUAGCAUGGCUUU |
| BH1088 | No. 4638 | GCCAUGCUAAGGUGGUUUUCA | No. 5340 | UGAAAACCACCUUAGCAUGGCUU |
| BH1089 | No. 4639 | CCAUGCUAAGGUGGUUUUCAG | No. 5341 | CUGAAAACCACCUUAGCAUGGCU |
| BH1090 | No. 4640 | CAUGCUAAGGUGGUUUUCAGA | No. 5342 | UCUGAAAACCACCUUAGCAUGGC |

TABLE 2-17

| Double stranded | | Sense strand sequence | | Antisense strand sequence |
|---|---|---|---|---|
| nucleic acid No. | SEQ ID NO. | (5′→3′) | SEQ ID NO. | (5′→3′) |
| BH1092 | No. 4641 | UGCUAAGGUGGUUUUCAGAUU | No. 5343 | AAUCUGAAAACCACCUUAGCAUG |
| BH1093 | No. 4642 | GCUAAGGUGGUUUUCAGAUUC | No. 5344 | GAAUCUGAAAACCACCUUAGCAU |
| BH1095 | No. 4643 | UAAGGUGGUUUUCAGAUUCCA | No. 5345 | UGGAAUCUGAAAACCACCUUAGC |
| BH1096 | No. 4644 | AAGGUGGUUUUCAGAUUCCAC | No. 5346 | GUGGAAUCUGAAAACCACCUUAG |
| BH1097 | No. 4645 | AGGUGGUUUUCAGAUUCCACA | No. 5347 | UGUGGAAUCUGAAAACCACCUUA |
| BH1099 | No. 4646 | GUGGUUUUCAGAUUCCACACA | No. 5348 | UGUGUGGAAUCUGAAAACCACCU |
| BH1100 | No. 4647 | UGGUUUUCAGAUUCCACACAA | No. 5349 | UUGUGUGGAAUCUGAAAACCACC |
| BH1101 | No. 4648 | GGUUUUCAGAUUCCACACAAA | No. 5350 | UUUGUGUGGAAUCUGAAAACCAC |
| BH1102 | No. 4649 | GUUUUCAGAUUCCACACAAAA | No. 5351 | UUUUGUGUGGAAUCUGAAAACCA |
| BH1103 | No. 4650 | UUUUCAGAUUCCACACAAAAU | No. 5352 | AUUUUGUGUGGAAUCUGAAAACC |
| BH1104 | No. 4651 | UUUCAGAUUCCACACAAAAUG | No. 5353 | CAUUUUGUGUGGAAUCUGAAAAC |
| BH1105 | No. 4652 | UUCAGAUUCCACACAAAAUGU | No. 5354 | ACAUUUUGUGUGGAAUCUGAAAA |
| BH1106 | No. 4653 | UCAGAUUCCACACAAAAUGUC | No. 5355 | GACAUUUUGUGUGGAAUCUGAAA |
| BH1107 | No. 4654 | CAGAUUCCACACAAAAUGUCA | No. 5356 | UGACAUUUUGUGUGGAAUCUGAA |
| BH1109 | No. 4655 | GAUUCCACACAAAAUGUCACA | No. 5357 | UGUGACAUUUUGUGUGGAAUCUG |
| BH1111 | No. 4656 | UUCCACACAAAAUGUCACACU | No. 5358 | AGUGUGACAUUUUGUGUGGAAUC |
| BH1112 | No. 4657 | UCCACACAAAAUGUCACACUU | No. 5359 | AAGUGUGACAUUUUGUGUGGAAU |
| BH1113 | No. 4658 | CCACACAAAAUGUCACACUUG | No. 5360 | CAAGUGUGACAUUUUGUGUGGAA |
| BH1114 | No. 4659 | CACACAAAAUGUCACACUUGU | No. 5361 | ACAAGUGUGACAUUUUGUGUGGA |
| BH1115 | No. 4660 | ACACAAAAUGUCACACUUGUU | No. 5362 | AACAAGUGUGACAUUUUGUGUGG |
| BH1116 | No. 4661 | CACAAAAUGUCACACUUGUUU | No. 5363 | AAAcAAGUGUGACAUUUUGUGUG |
| BH1118 | No. 4662 | CAAAAUGUCACACUUGUUUCU | No. 5364 | AGAAACAAGUGUGACAUUUUGUG |
| BH1120 | No. 4663 | AAAUGUCACACUUGUUUCUUG | No. 5365 | CAAGAAACAAGUGUGACAUUUUG |
| BH1121 | No. 4664 | AAUGUCACACUUGUUUCUUGU | No. 5366 | ACAAGAAACAAGUGUGACAUUUU |
| BH1122 | No. 4665 | AUGUCACACUUGUUUCUUGUU | No. 5367 | AACAAGAAACAAGUGUGACAUUU |
| BH1124 | No. 4666 | GUCACACUUGUUUCUUGUUCA | No. 5368 | UGAACAAGAAACAAGUGUGACAU |
| BH1125 | No. 4667 | UCAGACUUGUUUCUUGUUCAU | No. 5369 | AUGAACAAGAAACAAGUGUGACA |
| BH1127 | No. 4668 | ACACUUGUUUCUUGUUCAUCC | No. 5370 | GGAUGAACAAGAAACAAGUGUGA |
| BH1128 | No. 4669 | CACUUGUUUCUUGUUCAUCCA | No. 5371 | UGGAUGAACAAGAAACAAGUGUG |
| BH1129 | No. 4670 | ACUUGUUUCUUGUUCAUCCAA | No. 5372 | UUGGAUGAACAAGAAACAAGUGU |
| BH1130 | No. 4671 | CUUGUUUCUUGUUCAUCCAAG | No. 5373 | CUUGGAUGAACAAGAAACAAGUG |
| BH1131 | No. 4672 | UUGUUUCUUGUUCAUCCAAGG | No. 5374 | CCUUGGAUGAACAAGAAACAAGU |
| BH1133 | No. 4673 | GUUUCUUGUUCAUCCAAGGAA | No. 5375 | UUCCUUGGAUGAACAAGAAACAA |
| BH1134 | No. 4674 | UUUCUUGUUCAUCCAAGGAAC | No. 5376 | GUUCCUUGGAUGAACAAGAAACA |
| BH1135 | No. 4675 | UUCUUGUUCAUCCAAGGAACC | No. 5377 | GGUUCCUUGGAUGAACAAGAAAC |
| BH1136 | No. 4676 | UCUUGUUCAUCCAAGGAACCU | No. 5378 | AGGUUCCUUGGAUGAACAAGAAA |
| BH1137 | No. 4677 | CUUGUUCAUCCAAGGAACCUA | No. 5379 | UAGGUUCCUUGGAUGAACAAGAA |
| BH1138 | No. 4678 | UUGUUCAUCCAAGGAACCUAA | No. 5380 | UUAGGUUCCUUGGAUGAACAAGA |
| BH1139 | No. 4679 | UGUUCAUCCAAGGAACCUAAU | No. 5381 | AUUAGGUUCCUUGGAUGAACAAG |
| BH1140 | No. 4680 | GUUCAUCCAAGGAACCUAAUU | No. 5382 | AAUUAGGUUCCUUGGAUGAACAA |

TABLE 2-18

| Double stranded | | Sense strand sequence | | Antisense strand sequence |
|---|---|---|---|---|
| nucleic acid No. | SEQ ID NO. | (5′→3′) | SEQ ID NO. | (5′→3′) |
| BH1141 | No. 4681 | UUCAUCCAAGGAACCUAAUUG | No. 5383 | CAAUUAGGUUCCUUGGAUGAACA |
| BH1142 | No. 4682 | UCAUCCAAGGAACCUAAUUGA | No. 5384 | UCAAUUAGGUUCCUUGGAUGAAC |
| BH1143 | No. 4683 | CAUCCAAGGAACCUAAUUGAA | No. 5385 | UUCAAUUAGGUUCCUUGGAUGAA |
| BH1144 | No. 4684 | AUCCAAGGAACCUAAUUGAAA | No. 5386 | UUUCAAUUAGGUUCCUUGGAUGA |
| BH1145 | No. 4685 | UCCAAGGAACCUAAUUGAAAU | No. 5387 | AUUUCAAUUAGGUUCCUUGGAUG |
| BH1146 | No. 4686 | CCAAGGAACCUAAUUGAAAUU | No. 5388 | AAUUUCAAUUAGGUUCCUUGGAU |
| BH1147 | No. 4687 | CAAGGAACCUAAUUGAAAUUU | No. 5389 | AAAUUUCAAUUAGGUUCCUUGGA |
| BH1148 | No. 4688 | AAGGAACCUAAUUGAAAUUUA | No. 5390 | UAAAUUUCAAUUAGGUUCCUUGG |
| BH1149 | No. 4689 | AGGAACCUAAUUGAAAUUUAA | No. 5391 | UUAAAUUUCAAUUAGGUUCCUUG |
| BH1150 | No. 4690 | GGAACCUAAUUGAAAUUUAAA | No. 5392 | UUUAAAUUUCAAUUAGGUUCCUU |
| BH1151 | No. 4691 | GAACCUAAUUGAAAUUUAAAA | No. 5393 | UUUUAAAUUUCAAUUAGGUUCCU |
| BH1155 | No. 4692 | CUAAUUGAAAUUUAAAAAUAA | No. 5394 | UUAUUUUUAAAUUUCAAUUAGGU |
| BH1167 | No. 4693 | UAAAAAUAAAGCUACUGAAUU | No. 5395 | AAUUCAGUAGCUUUAUUUUUAAA |
| BH1168 | No. 4694 | AAAAAUAAAGCUACUGAAUUU | No. 5396 | AAAUUCAGUAGCUUUAUUUUUAA |
| BH1169 | No. 4695 | AAAAUAAAGCUACUGAAUUUA | No. 5397 | UAAAUUCAGUAGCUUUAUUUUUA |
| BH1171 | No. 4696 | AAUAAAGCUACUGAAUUUAUU | No. 5398 | AAUAAAUUCAGUAGCUUUAUUUU |
| BH1175 | No. 4697 | AAGCUACUGAAUUUAUUGCCG | No. 5399 | CGGCAAUAAAUUCAGUAGCUUUA |
| BH1176 | No. 4698 | AGCUACUGAAUUUAUUGCCGC | No. 5400 | GCGGCAAUAAAUUCAGUAGCUUU |
| BH1177 | No. 4699 | GCUACUGAAUUUAUUGCCGCA | No. 5401 | UGCGGCAAUAAAUUCAGUAGCUU |
| BH1178 | No. 4700 | CUACUGAAUUUAUUGCCGCAC | No. 5402 | GUGCGGCAAUAAAUUCAGUAGCU |
| BH1179 | No. 4701 | CUCUGCCAUGUUGCUAUUGCA | No. 5403 | UGCAAUAGCAACAUGGCAGAGGA |
| BH1180 | No. 4702 | GCUGGAAUCUUAGAAAAUGGA | No. 5404 | UCCAUUUUCUAAGAUUCCAGCGA |

[0256] The double-stranded nucleic acid in the composition of the present invention can be introduced into cells of a mammal by administering the composition of the present invention to the cells.

[0257] The nucleic acid conjugate of the present invention can be introduced into mammalian cells in vivo by known transfection procedures that can be implemented in vivo. By administering the composition of the present invention intravenously to mammals including humans, it is possible to deliver it to the blood vessels, liver, lungs, pancreas and/or kidneys for example, and thereby introduce the double stranded nucleic acid in the composition of the present invention into cells at the organ or the site.

[0258] By introducing the double-stranded nucleic acid in the composition of the present invention into cells at the organ or the site, it is possible to reduce expression of the β2GPI gene in those cells, and thereby treat or prevent β2GPI-associated diseases such as systemic lupus erythematosus (SLE), antiphospholipid antibody syndrome, complications of blood dialysis in end-stage renal failure patients, and arteriosclerosis. The target of administration is a mammal, preferably a human.

[0259] The lipid particle-containing composition of the present invention may also be used as a tool to verify the effectiveness of β2GPI gene suppression in an in vivo efficacy evaluation model of a therapeutic or preventative agent for such diseases. The in vivo efficacy evaluation model may be a lupus anticoagulant (LA) test or the like. Like anti-β2GPI antibodies, LA is a kind of anti-phospholipid antibody, and inhibits phospholipid-dependent clotting reactions in collected blood in vitro. LA appears mainly in diseases such as SLE and APS. It has been reported a lot that like anti-β2GPI antibodies, LA is associated with the occurrence or pathology of thrombosis and infertility (Blood, 2003, Vol. 101, No. 5, pp. 1827-1832). Moreover, anti-β2GPI antibodies have also been reported to cause β2GPI-dependent LA activity because they acquire phospholipid-binding activity via β2GPI (Thrombosis and Haemostasis, 1998, Vol. 79, No. 1, pp. 79-86). Furthermore, it has been reported that this β2GPI-dependent LA is strongly correlated to the incidence of disease pathology (Blood, 2004, Vol. 104, No. 12, pp. 3598-3602), so it is thought that a novel and effective treatment method for β2GPI-associated disease could be provided if LA activity could be decreased by suppressing β2GPI expression in blood. In clinical testing, LA can be detected by measuring activated partial thromboplastin time, kaolin clotting time and/or dilute Russell viper venom time (dRVVT).

[0260] When the nucleic acid conjugate of the present invention is used as a therapeutic or preventive agent against β2GPI-associated disease, an administration route which is the most effective for the treatment is preferably selected. The route is preferably intravenous administration, subcutaneous administration or intramuscular administration, and more preferably subcutaneous administration.

[0261] The dosage differs depending on the condition and age of the subject and the administration route and the like. The dosage may be 0.1 μg to 1,000 mg per day, and preferably 1 to 100 mg per day (based on the amount of the double-stranded nucleic acid).

### EXAMPLES

[0262] Next, the present invention is explained in detail using Reference Examples, Examples and Test Examples. However, the present invention is not limited to these Examples and Test Examples. The proton nuclear magnetic resonance spectra (1H NMR) given in Reference Examples were measured at 270 MHz, 300 MHz or 400 MHz. Exchangeable protons may not be observed clearly depending on the compound and the measurement conditions. The multiplicity of the signal is shown in a conventional way. The term “br” represents an apparently broad signal.

### Reference Example 1

[chemical structure]

(wherein, Fmoc and DMTr are defined as above.)

[0264] Step 1

[0265] (9H-fluoren-9-yl)methyl((2R,3R)-1,3-dihydroxybutan-2-yl)carbamate (Chem-Impex International, Inc., 1.50 g, 4.58 mmol) was dissolved in pyridine (20 mL), 4,4′-dimethoxytrityl chloride (Tokyo Chemical Industry Co., Ltd., 1.71 g, 5.04 mmol) was added under ice cooling, and the mixture was stirred for 2 hours at room temperature. The reaction solution was ice cooled, 10% aqueous citric acid solution was added, and the mixture was extracted with ethyl acetate. The organic layer was washed with saturated saline and dried with anhydrous magnesium sulfate. The solvent was distilled off under reduced pressure, and the residue was purified by silica gel column chromatography (hexane/ethyl acetate=90/10) to obtain Compound 2 (1.07 g, yield 37%),

[0266] ESI-MS m/z: 630 (M+H)+;

[0267] Step 2

[0268] Compound 2 obtained in step 1 (1.07 g, 1.699 mmol) was dissolved in N,N-dimethylformamide (10 mL), and piperidine (0.336 mL, 3.40 mmol) was added at room temperature, and the mixture was stirred for 3 hours. Water was added to the reaction solution, which was then extracted with ethyl acetate, and the organic layer was washed with saturated saline and dried with anhydrous magnesium sulfate. The solvent was distilled off under reduced pressure, and the residue was purified by amino silica gel column chromatography (chloroform/methanol=90/10) to obtain Compound 3 (0.59 g, yield 85%).

[0269] ESI-MS m/z: 408 (M+H)+;

[0270] Step 3

[0271] Compound 3 obtained in step 2 (0.590 g, 1.45 mmol) was dissolved in N,N-dimethylformamide (8 mL), 12-ethoxy-12-oxododecanoic acid (Tokyo Chemical Industry Co., Ltd., 0.374 g, 1.45 mmol), diisopropylethylamine (0.632 mL, 3.62 mmol) and 2-(1H-benzotriazol-1-yl)-1,1,3,3-tetramethyluronium hexafluorophosphate (Wako Pure Chemicals Industries, Ltd., 0.659 g, 1.74 mmol) were added, and the mixture was stirred overnight at room temperature. Water was added to the reaction solution, which was then extracted twice with ethyl acetate, and the organic layer was washed with saturated saline and dried with anhydrous magnesium sulfate. The solvent was distilled off under reduced pressure, and the residue was purified by amino silica gel column chromatography (hexane/ethyl acetate=90/10 to 40/60) to obtain Compound 4 (0.430 g, yield 46%).

[0272] ESI-MS m/z: 648 (M+H)+;

[0273] Step 4

[0274] Compound 4 obtained in step 3 (0.430 g, 0.664 mmol) was dissolved in ethanol (5 mL), and an aqueous lithium hydroxide solution (1.0 mL, 1.99 mol/L) was added, and the mixture was stirred overnight at room temperature. The reaction solution was ice cooled, 10% aqueous citric acid solution was added, the mixture was extracted twice with ethyl acetate. The organic layer was washed with saturated saline and dried with anhydrous magnesium sulfate. The solvent was then distilled off under reduced pressure to obtain Compound 5 as a crude product (0.420 g, crude yield 100%).

[0275] ESI-MS m/z: 618(M−H)−; 1H-NMR (CDCl3) δ: 1.12 (d, J=6.3 Hz, 3H),1.26-1.35 (m, 12H), 1.57-1.67 (m, 4H), 2.23 (t, J=7.7 Hz, 2H), 2.29 (t, J=7.4 Hz, 2H), 3.25 (dd, J=9.6, 3.9 Hz, 1H), 3.37 (dd, J=9.6, 4.7 Hz, 1H), 3.39-3.41 (m, 1H), 3.79 (s, 6H), 3.91-3.94 (m, 1H), 4.04-4.09 (m, 1H), 6.43 (d, J=8.8 Hz, 1H), 6.83 (d, J=8.8 Hz, 4H), 7.21-7.24 (m, 1H), 7.26-7.30 (m, 6H), 7.37-7.39 (m, 2H).

### Reference Example 2

[chemical structure]

[chemical structure]

(wherein, Ac and DMTr are defined as above, and Po represents the solid-phase carrier LCAA-CPG.)

[0277] Step 5

[0278] Compound 6 (0.119 g, 0.066 mmol) that had been synthesized by a known method (see Journal of the American Chemical Society, Vol. 136, pp. 16958-16961, 2014) was dissolved in THF (2 mL), to which Compound 5 (0.062 g, 0.100 mmol) obtained in step 4 of Example 1, diisopropylethylamine (0.116 mL, 0.663 mmol), 2-(1H-benzotriazol-1-yl)-1,1,3,3-tetramethyluronium hexafluorophosphate (0.050 g, 0.133 mmol) and N,N-dimethylaminopyridine (Nacalai Tesque, Inc., 8.1 mg, 0.133 mmol) was added. The mixture was stirred overnight at room temperature. The reaction solution was ice cooled, 10% aqueous citric acid solution was added, the mixture was extracted with chloroform. The organic layer was washed with saturated saline and dried with anhydrous magnesium sulfate. The solvent was distilled off under reduced pressure, and the residue was purified by amino silica gel column chromatography (methanol/chloroform) to obtain Compound 7 (0.035 g, yield 22%).

[0279] ESI-MS m/z: 1048 (M+2H)2+

[0280] Step 6

[0281] Compound 7 obtained in step 5 (0.135 g, 0.056 mmol) was dissolved in dichloromethane (2 mL), succinic acid anhydride (Tokyo Chemical Industry Co., Ltd., 0.011 g, 0.113 mmol) and N,N-dimethylaminopyridine (0.021 g, 0.169 mmol) were added, and the mixture was stirred overnight at room temperature. The reaction solution was ice cooled, 10% aqueous citric acid solution was added, and the mixture was extracted twice with ethyl acetate. The organic layer was washed with saturated saline and dried with anhydrous magnesium sulfate. The solvent was distilled off under reduced pressure to obtain Compound 8 as a crude product (0.110 g, crude yield 78%).

[0282] ESI-MS m/z: 1089 (M+2H)2+;

[0283] 1H-NMR (DMSO-d6) δ: 1.02 (d, J=6.3 Hz, 3H), 1.15-1.25 (m, 12H), 1.39-1.55 (m, 22H), 1.77 (s, 9H), 1.88 (d, J=7.9 Hz, 9H), 1.99 (s, 9H), 2.04 (t, J=7.1 Hz, 6H), 2.10 (s, 9H), 2.11-2.15 (m, 2H), 2.28 (t, J=6.5 Hz, 6H), 2.37-2.42 (m, 2H), 2.49-2.53 (m, 2H), 2.83-2.95 (m, 2H), 2.99-3.08 (m, 12H), 3.31-3.45 (m, 6H), 3.48-3.58 (m, 12H), 3.67-3.75 (m, 2H), 3.73 (s, 6H), 3.83-3.92 (m, 3H), 3.97-4.06 (m, 9H), 4.10-4.18 (m, 1H), 4.49 (d, J=8.4 Hz, 3H), 4.97 (dd, J=11.3, 3.4 Hz, 3H), 5.09-5.16 (m, 1H), 5.21 (d, J=3.3 Hz, 3H), 6.84-6.91 (m, 4H), 6.99 (s, 1H), 7.12-7.40 (m, 9H), 7.71-7.89 (m, 10H).

[0284] Step 7

[0285] Compound 8 obtained in step 6 (0.050 g, 0.014 mmol), O-(benzotriazol-1-yl)-N,N,N′,N′-tetramethyluronium hexafluorophosphate (0.011 g, 0.028 mmol) and diisopropylethylamine (0.098 mL, 0.056 mmol) were dissolved in N,N-dimethylformamide (2 mL), and the solid-phase carrier LCAA-CPG (Sigma-Aldrich Corporation, 0.25 g, 0.014 mmol) was added, and the mixture was stirred overnight at room temperature. The mixture was filtered through frit, washed with dichloromethane, 10% methanol dichloromethane solution and diethyl ether, and reacted with an acetic anhydride/pyridine solution to obtain Compound 9 (17.7 μmol/g, yield 30%). The yield was calculated from an introduction rate onto the solid-phase carrier, which can be determined from the absorption derived from DMTr groups by adding a 1% trifluoroacetic acid/dichloromethane solution to the solid-phase carrier.

### Test Example 1

### Measuring Knockdown Activity of β2GPI mRNA

[0286] HepG2 cells (obtained from ATCC, ATCC No. HB-8065), a cell strain derived from human liver cancer, were seeded on 96-well culture plates so as to be 5,000 cells/80 μL/well. MEM medium (Life Technologies Corporation, Catalog No. 11095-098) containing 10% fetal bovine serum (FBS) was used. The double-stranded nucleic acids described in Tables 4-1 to 4-16 and RNAiMax transfection reagent (Life Technologies Corporation, Catalog No. 1401251) were diluted with Opti-MEM medium (Life Technologies Corporation, Catalog No. 11058-021), and 20 μL of the siRNA/RNAiMax mixture was added to each 96-well culture plate so as to be a final concentration of the double-stranded nucleic acid of 100 pmol/L, and the plate was cultured for 24 hours under conditions of 37° C., 5% CO₂. The cells were then washed with PBS (phosphate-buffered saline), and cDNA was synthesized from each plate using a Cells-to-Ct kit (Applied Biosystems, Inc., Catalog No. AM1728) according to the methods described in the attached instruction. 5 μL of this cDNA was added to a MicroAmpOptical 96-well plate (Applied Biosystems, Inc., Catalog No. 4326659), to which 10 μL of TaqMan Gene Expression Master Mix (Applied Biosystems, Inc., Catalog No. 4369016), 3 μL of UltraPure Distilled Water (Life Technologies Corporation, Catalog No. 10977-015), 1 μL of a human β2GPI probe and 1 μL of a human GAPDH probe were further added. Using an ABI7900 HT real time PCR system, real time PCR was performed on the human β2GPI gene and human GAPDH (D-glyceraldehyde-3-phosphate dehydrogenase). GAPDH is a constitutively expressed gene, which was measured as an internal control and used to correct the expressed amount of β2GPI. The amount of β2GPI mRNA obtained when HepG2 cells were treated with the transfection reagent alone without adding siRNA being set to be 1.0, the relative expressed amount of β2GPI mRNA obtained when each siRNA was introduced was calculated. This test was performed three times, and the average values of the relative expressed amounts of β2GPI mRNA are described in Tables 4-1 to 4-16.

TABLE 4-1

| Double | | | | | |
|---|---|---|---|---|---|
| stranded | | | | | |
| nucleic | SEQ ID | Sense strand sequence | | Antisense strand | |
| acid No. | NO. | (5′→3′) | SEQ ID NO. | sequence (5′→3′) | SEQ ID NO. |
| AH0033 | No. 33 | GUAGUGCCAGUGUGACUCAUC | No. 1213 | UGAGUCACACUGGCACUACCA | No. 2393 |
| AH0034 | No. 34 | UAGUGCCAGUGUGACUCAUCC | No. 1214 | AUGAGUCACACUGGCACUACC | No. 2394 |
| AH0035 | No. 35 | AGUGCCAGUGUGACUCAUCCA | No. 1215 | GAUGAGUCACACUGGCACUAC | No. 2395 |
| AH0036 | No. 36 | GUGCCAGUGUGACUCAUCCAC | No. 1216 | GGAUGAGUCACACUGGCACUA | No. 2396 |
| AH0037 | No. 37 | UGCCAGUGUGAGUCAUCCACA | No. 1217 | UGGAUGAGUCACACUGGCACU | No. 2397 |
| AH0038 | No. 38 | GCCAGUGUGACUCAUCCACAA | No. 1218 | GUGGAUGAGUCACACUGGCAC | No. 2398 |
| AH0039 | No. 39 | CCAGUGUGACUCAUCCACAAU | No. 1219 | UGUGGAUGAGUCACACUGGCA | No. 2399 |
| AH0040 | No. 40 | CAGUGUGACUCAUCCACAAUG | No. 1220 | UUGUGGAUGAGUCACACUGGC | No. 2400 |
| AH0041 | No. 41 | AGUGUGACUCAUCCACAAUGA | No. 1221 | AUUGUGGAUGAGUCACACUGG | No. 2401 |
| AH0042 | No. 42 | GUGUGACUCAUCCACAAUGAU | No. 1222 | CAUUGUGGAUGAGUCACACUG | No. 2402 |
| AH0043 | No. 43 | UGUGACUCAUCCACAAUGAUU | No. 1223 | UCAUUGUGGAUGAGUCACACU | No. 2403 |
| AH0044 | No. 44 | GUGACUCAUCCACAAUGAUUU | No. 1224 | AUCAUUGUGGAUGAGUCACAC | No. 2404 |
| AH0045 | No. 45 | UGACUCAUCCACAAUGAUUUC | No. 1225 | AAUCAUUGUGGAUGAGUCACA | No. 2405 |
| AH0046 | No. 46 | GACUCAUCCACAAUGAUUUCU | No. 1226 | AAAUCAUUGTGGAUGAGUCAG | No. 2406 |
| AH0047 | No. 47 | ACUCAUCCACAAUGAUUUCUC | No. 1227 | GAAAUCAUUGUGGAUGAGUCA | No. 2407 |
| AH0048 | No. 48 | CUCAUCCACAAUGAUUUCUCC | No. 1228 | AGAAAUCAUUGUGGAUGAGUC | No. 2408 |
| AH0050 | No. 50 | CAUCCACAAUGAUUUCUCCAG | No. 1230 | GGAGAAAUCAUUGUGGAUGAG | No. 2410 |
| AH0051 | No. 51 | AUCCACAAUGAUUUCUCCAGU | No. 1231 | UGGAGAAAUCAUUGUGGAUGA | No. 2411 |
| AH0052 | No. 52 | UCCACAAUGAUUUCUCCAGUG | No. 1232 | CUGGAGAAAUCAUUGUGGAUG | No. 2412 |
| AH0053 | No. 53 | CCACAAUGAUUUCUCCAGUGC | No. 1233 | ACUGGAGAAAUCAUUGUGGAU | No. 2413 |
| AH0054 | No. 54 | CACAAUGAUUUCUCCAGUGCU | No. 1234 | CACUGGAGAAAUCAUUGUGGA | No. 2414 |
| AH0055 | No. 55 | ACAAUGAUUUCUCCAGUGCUC | No. 1235 | GCACUGGAGAAAUCAUUGUGG | No. 2415 |
| AH0056 | No. 56 | CAAUGAUUUCUCCAGUGCUCA | No. 1236 | AGCACUGGAGAAAUCAUUGUG | No. 2416 |
| AH0057 | No. 57 | AAUGAUUUCUCCAGUGCUCAU | No. 1237 | GAGCACUGGAGAAAUCAUUGU | No. 2417 |
| AH0058 | No. 58 | AUGAUUUCUCCAGUGCUCAUC | No. 1238 | UGAGCACUGGAGAAAUCAUUG | No. 2418 |
| AH0059 | No. 59 | UGAUUUCUCCAGUGCUCAUCU | No. 1239 | AUGAGCACUGGAGAAAUCAUU | No. 2419 |
| AH0060 | No. 60 | GAUUUCUCCAGUGCUCAUCUU | No. 1240 | GAUGAGGACUGGAGAAAUCAU | No. 2420 |
| AH0061 | No. 61 | AUUUCUCCAGUGCUCAUCUUG | No. 1241 | AGAUGAGCACUGGAGAAAUCA | No. 2421 |
| AH0062 | No. 62 | UUUCUCCAGUGCUCAUCUUGU | No. 1242 | AAGAUGAGCACUGGAGAAAUC | No. 2422 |
| AH0063 | No. 63 | UUCUCCAGUGCUCAUCUUGUU | No. 1243 | CAAGAUGAGCACUGGAGAAAU | No. 2423 |
| AH0064 | No. 64 | UCUCCAGUGCUCAUCUUGUUC | No. 1244 | ACAAGAUGAGCACUGGAGAAA | No. 2424 |
| AH0065 | No. 65 | CUCCAGUGCUCAUCUUGUUCU | No. 1245 | AACAAGAUGAGCACUGGAGAA | No. 2425 |
| AH0066 | No. 66 | UCCAGUGCUCAUCUUGUUCUC | No. 1246 | GAACAAGAUGAGCACUGGAGA | No. 2426 |
| AH0067 | No. 67 | CCAGUGCUCAUCUUGUUCUCG | No. 1247 | AGAACAAGAUGAGCACUGGAG | No. 2427 |
| AH0068 | No. 68 | CAGUGCUCAUCUUGUUCUCGA | No. 1248 | GAGAACAAGAUGAGCACUGGA | No. 2428 |
| AH0069 | No. 69 | AGUGCUCAUCUUGUUCUCGAG | No. 1249 | CGAGAACAAGAUGAGCACUGG | No. 2429 |
| AH0070 | No. 70 | GUGGUCAUCUUGUUCUCGAGU | No. 1250 | UCGAGAACAAGAUGAGCACUG | No. 2430 |
| AH0071 | No. 71 | UGCUCAUCUUGUUCUCGAGUU | No. 1251 | CUCGAGAACAAGAUGAGCACU | No. 2431 |
| AH0072 | No. 72 | GCUCAUCUUGUUCUCGAGUUU | No. 1252 | ACUCGAGAACAAGAUGAGCAC | No. 2432 |
| AH0073 | No. 73 | CUCAUCUUGUUCUCGAGUUUU | No. 1253 | AACUCGAGAACAAGAUGAGCA | No. 2433 |
| AH0074 | No. 74 | UCAUCUUGUUCUCGAGUUUUC | No. 1254 | AAACUCGAGAACAAGAUGAGC | No. 2434 |
| AH0075 | No. 75 | CAUCUUGUUCUCGAGUUUUCU | No. 1255 | AAAACUCGAGAACAAGAUGAG | No. 2435 |
| AH0076 | No. 76 | AUCUUGUUCUCGAGUUUUCUC | No. 1256 | GAAAACUCGAGAACAAGAUGA | No. 2436 |
| AH0077 | No. 77 | UCUUGUUCUCGAGUUUUCUCU | No. 1257 | AGAAAACUCGAGAACAAGAUG | No. 2437 |
| AH0078 | No. 78 | CUUGUUCUCGAGUUUUCUCUG | No. 1258 | GAGAAAACUCGAGAACAAGAU | No. 2438 |
| | | | Double | | |
| | | | stranded | | |
| | | | nucleic | Target β2GPI | Relative expressed |
| | | | acid No. | mRNA sequence | amount of β2GPI |
| | | | AH0033 | GTAGTGCCAGTGTGACTCA | 0.172 |
| | | | AH0034 | TAGTGCCAGTGTGACTCAT | 0.185 |
| | | | AH0035 | AGTGCCAGTGTGACTCATC | 0.178 |
| | | | AH0036 | GTGCCAGTGTGACTCATCC | 0.191 |
| | | | AH0037 | TGCCAGTGTGACTCATCCA | 0.148 |
| | | | AH0038 | GGCAGTGTGACTCATCCAC | 0.166 |
| | | | AH0039 | CCAGTGTGACTCATCCACA | 0.179 |
| | | | AH0040 | CAGTGTGACTCATCCACAA | 0.126 |
| | | | AH0041 | AGTGTGACTCATCCACAAT | 0.081 |
| | | | AH0042 | GTGTGACTCATCGACAATG | 0.123 |
| | | | AH0043 | TGTGACTCATCCACAATGA | 0.144 |
| | | | AH0044 | GTGACTCATCCACAATGAT | 0.148 |
| | | | AH0045 | TGACTCATCCACAATGATT | 0.100 |
| | | | AH0046 | GACTCATCCACAATGATTT | 0.114 |
| | | | AH0047 | ACTCATCCACAATGATTTC | 0.211 |
| | | | AH0048 | CTCATCCACAATGATTTCT | 0.136 |
| | | | AH0050 | CATCCACAATGATTTCTCC | 0.157 |
| | | | AH0051 | ATCCACAATGATTTCTCCA | 0.136 |
| | | | AH0052 | TCCACAATGATTTCTCCAG | 0.290 |
| | | | AH0053 | CCACAATGATTTCTCCAGT | 0.128 |
| | | | AH0054 | CACAATGATTTCTCCAGTG | 0.130 |
| | | | AH0055 | ACAATGATTTCTCCAGTGC | 0.291 |
| | | | AH0056 | CAATGATTTCTCCAGTGCT | 0.139 |
| | | | AH0057 | AATGATTTCTCCAGTGCTC | 0.247 |
| | | | AH0058 | ATGATTTCTCCAGTGCTCA | 0.110 |
| | | | AH0059 | TGATTTCTCCAGTGCTCAT | 0.118 |
| | | | AH0060 | GATTTCTCCAGTGCTCATC | 0.111 |
| | | | AH0061 | ATTTCTCCAGTGCTCATCT | 0.146 |
| | | | AH0062 | TTTCTCCAGTGCTCATCTT | 0.202 |
| | | | AH0063 | TTCTCCAGTGCTCATCTTG | 0.187 |
| | | | AH0064 | TCTCCAGTGCTCATCTTGT | 0.103 |
| | | | AH0065 | CTCCAGTGCTCATCTTGIT | 0.094 |
| | | | AH0066 | TCCAGTGGTCATCTTGTTC | 0.128 |
| | | | AH0067 | CCAGTGCTCATCTTGTTCT | 0.106 |
| | | | AH0068 | CAGTGCTCATCTTGTTCTC | 0.103 |
| | | | AH0069 | AGTGCTCATCTTGTTCTCG | 0.152 |
| | | | AH0070 | GTGCTCATCTTGTTCTCGA | 0.078 |
| | | | AH0071 | TGCTCATCTTGTTCTCGAG | 0.091 |
| | | | AH0072 | GCTCATCTTGTTCTCGAGT | 0.111 |
| | | | AH0073 | CTCATCTTGTTCTCGAGTT | 0.086 |
| | | | AH0074 | TCATCTTGTTCTCGAGTTT | 0.073 |
| | | | AH0075 | CATCTTGTTCTCGAGTTTT | 0.078 |
| | | | AH0076 | ATCTTGTTCTCGAGTTTTC | 0.107 |
| | | | AH0077 | TCTTGTTCTCGAGTTTTCT | 0.137 |
| | | | AH0078 | CTTGTTCTCGAGTTTTCTC | 0.123 |

TABLE 4-2

| Double | | | | |
|---|---|---|---|---|
| stranded | | | | |
| nucleic | | Sense strand sequence | | Antisense strand sequence |
| acid No. | SEQ ID NO. | (5′→3′) | SEQ ID NO. | (5′→3′) |
| AH0079 | No. 79 | UUGUUCUCGAGUUUUCUCUGC | No. 1259 | AGAGAAAACUCGAGAACAAGA |
| AH0080 | No. 80 | UGUUCUCGAGUUUUCUCUGCC | No. 1260 | CAGAGAAAACUCGAGAACAAG |
| AH0081 | No. 81 | GUUCUCGAGUUUUCUCUGCCA | No. 1261 | GCAGAGAAAACUCGAGAACAA |
| AH0083 | No. 83 | UCUCGAGUUUUCUCUGCCAUG | No. 1263 | UGGCAGAGAAAACUCGAGAAC |
| AH0084 | No. 84 | CUCGAGUUUUCUCUGCCAUGU | No. 1264 | AUGGCAGAGAAAACUCGAGAA |
| AH0085 | No. 85 | UCGAGUUUUCUCUGCCAUGUU | No. 1265 | CAUGGCAGAGAAAACUCGAGA |
| AH0086 | No. 86 | CGAGUUUUCUCUGCCAUGUUG | No. 1266 | ACAUGGCAGAGAAAACUCGAG |
| AH0087 | No. 87 | GAGUUUUCUCUGCCAUGUUGC | No. 1267 | AACAUGGCAGAGAAAACUCGA |
| AH0088 | No. 88 | AGUUUUCUCUGCCAUGUUGCU | No. 1268 | CAACAUGGCAGAGAAAACUCG |
| AH0089 | No. 89 | GUUUUCUCUGCCAUGUUGCUA | No. 1269 | GCAACAUGGCAGAGAAAACUC |
| AH0090 | No. 90 | UUUUCUCUGCCAUGUUGCUAU | No. 1270 | AGCAACAUGGCAGAGAAAACU |
| AH0091 | No. 91 | UUUCUCUGCCAUGUUGCUAUU | No. 1271 | UAGCAACAUGGCAGAGAAAAC |
| AH0092 | No. 92 | UUCUCUGCCAUGUUGCUAUUG | No. 1272 | AUAGCAACAUGGCAGAGAAAA |
| AH0093 | No. 93 | UCUCUGCCAUGUUGCUAUUGC | No. 1273 | AAUAGCAACAUGGCAGAGAAA |
| AH0096 | No. 96 | CUGCCAUGUUGCUAUUGCAGG | No. 1276 | UGCAAUAGCAACAUGGCAGAG |
| AH0093 | No. 97 | UGCCAUGUUGCUAUUGCAGGA | No. 1277 | CUGCAAUAGCAACAUGGCAGA |
| AH0098 | No. 98 | GCCAUGUUGCUAUUGCAGGAC | No. 1278 | CCUGCAAUAGCAACAUGGCAG |
| AH0099 | No. 99 | CCAUGUUGCUAUUGGAGGACG | No. 1279 | UCCUGCAAUAGCAACAUGGCA |
| AH0103 | No. 103 | GUUGCUAUUGCAGGACGGACC | No. 1283 | UCCGUCCUGCAAUAGCAACAU |
| AH0106 | No. 106 | GCUAUUGCAGGACGGACCUGU | No. 1286 | AGGUCCGUCCUGCAAUAGCAA |
| AH0107 | No. 107 | CUAUUGCAGGACGGACCUGUC | No. 1287 | CAGGUCCGUCCUGCAAUAGCA |
| AH0106 | No. 108 | UAUUGGAGGACGGACCUGUCC | No. 1288 | ACAGGUCCGUCCUGCAAUAGC |
| AH9109 | No. 109 | AUUGGAGGACGGACCUGUCCC | No. 1289 | GACAGGUCCGUCCUGCAAUAG |
| AH0112 | No. 112 | GCAGGACGGACCUGUCCCAAG | No. 1292 | UGGGACAGGUCCGUCCUGCAA |
| AH0114 | No. 114 | AGGACGGACCUGUCCCAAGCC | No. 1294 | CUUGGGACAGGUCCGUCCUGC |
| AH0115 | No. 115 | GGACGGACCUGUCCCAAGCCA | No. 1295 | GCUUGGGACAGGUCCGUCCUG |
| AH0117 | No. 117 | ACGGACCUGUCCCAAGCCAGA | No. 1297 | UGGCUUGGGACAGGUCCGUCC |
| AH0118 | No. 118 | CGGACCUGUCCCAAGCCAGAU | No. 1298 | CUGGCUUGGGACAGGUCCGUC |
| AH0119 | No. 119 | GGACCUGUCCCAAGCCACAUG | No. 1299 | UCUGGCUUGGGACAGGUCCGU |
| AH0120 | No. 120 | GACCUGUCCCAAGCCAGAUGA | No. 1300 | AUCUGGCUUGGGACAGGUCCG |
| AH0121 | No. 121 | ACCUGUCCCAAGCCAGAUGAU | No. 1301 | CAUCUGGCUUGGGACAGGUCC |
| AH0122 | No. 122 | CCUGUCCCAAGCCAGAUGAUU | No. 1302 | UCAUCUGGCUUGGGACAGGUC |
| AH0123 | No. 123 | CUGUCCCAAGCCAGAUGAUUU | No. 1303 | AUCAUCUGGCUUGGGACAGGU |
| AH0124 | No. 124 | UGUCCCAAGCCAGAUGAUUUA | No. 1304 | AAUCAUCUGGCUUGGGACAGG |
| AH0125 | No. 125 | GUCCCAAGCCAGAUGAUUUAC | No. 1305 | AAAUCAUCUGGCUUGGGACAG |
| AH0126 | No. 126 | UCCCAAGCCAGAUGAUUUACC | No. 1306 | UAAAUCAUCUGGCUUGGGACA |
| AH0127 | No. 127 | CCCAAGCCAGAUGAUUUACCA | No. 1307 | GUAAAUCAUCUGGCUUGGGAC |
| AH0128 | No. 128 | CCAAGCCAGAUGAUUUACCAU | No. 1308 | GGUAAAUCAUCUGGCUUGGGA |
| AH0129 | No. 129 | CAAGCCAGAUGAUUUACCAUU | No. 1309 | UGGUAAAUCAUCUGGCUUGGG |
| AH0130 | No. 130 | AAGCCAGAUGAUUUACCAUUU | No. 1310 | AUGGUAAAUCAUCUGGCUUGG |
| AH0131 | No. 131 | AGCCAGAUGAUUUACCAUUUU | No. 1311 | AAUGGUAAAUCAUCUGGCUUG |
| AH0132 | No. 132 | GCCAGAUGAUUUACCAUUUUC | No. 1312 | AAAUGGUAAAUCAUCUGGCUU |
| AH0133 | No. 133 | CCAGAUGAUUUACCAUUUUCC | No. 1313 | AAAAUGGUAAAUCAUCUGGCU |
| AH0134 | No. 134 | CAGAUGAUUUACCAUUUUCCA | No. 1314 | GAAAAUGGUAAAUCAUCUGGC |
| AH0135 | No. 135 | AGAUGAUUUACCAUUUUCCAC | No. 1315 | GGAAAAUGGUAAAUCAUCUGG |
| AH0136 | No. 136 | GAUGAUUUACCAUUUUCCACA | No. 1316 | UGGAAAAUGGUAAAUCAUCUG |
| | Double | | | Relative |
| | stranded | | | expressed |
| | nucleic | | Target β2GPI | amount |
| | acid No. | SEQ ID NO. | mRNA sequence | of β2GPI |
| | AH0079 | No. 2439 | TTGTTCTCGAGTTTTCTCT | 0.163 |
| | AH0080 | No. 2440 | TGTTCTCGAGTTTTCTCTG | 0.291 |
| | AH0081 | No. 2441 | GTTCTCGAGTTTTCTCTGC | 0.298 |
| | AH0083 | No. 2443 | TCTCGAGTTTTCTCTGCCA | 0.148 |
| | AH0084 | No. 2444 | CTCGAGTTTTCTCTGCCAT | 0.187 |
| | AH0085 | No. 2445 | TCGAGTTTTCTCTGCCATG | 0.146 |
| | AH0086 | No. 2446 | CGAGTTTTCTCTGCCATGT | 0.149 |
| | AH0087 | No. 2447 | GAGTTTTCTCTGCCATGTT | 0.221 |
| | AH0088 | No. 2448 | AGTTTTCTCTGCCATGTTG | 0.088 |
| | AH0089 | No. 2449 | GTTTTCTCTGCCATGTTGC | 0.194 |
| | AH0090 | No. 2450 | TTTTCTCTGCCATGTTGCT | 0.200 |
| | AH0091 | No. 2451 | TTTCTCTGCCATGTTGCTA | 0 296 |
| | AH0092 | No. 2452 | TTCTCTGCCATGTTGCTAT | 0.203 |
| | AH0093 | No. 2453 | TCTCTGCCATGTTGCTATT | 0.204 |
| | AH0096 | No. 2456 | CTGCCATGTTGCTATTGCA | 0.051 |
| | AH0093 | No. 2457 | TGCCATGTTGCTATTGCAG | 0.226 |
| | AH0098 | No. 2458 | GCCATGTTGCTATTGCAGG | 0.184 |
| | AH0099 | No. 2459 | CCATGTTGCTATTGCAGGA | 0.066 |
| | AH0103 | No. 2463 | GTTGCTATTGCAGGACGGA | 0.101 |
| | AH0106 | No. 2466 | GCTATTGCAGGACGGACCT | 0.118 |
| | AH0107 | No. 2467 | CTATTGCAGGACGGACCTG | 0.170 |
| | AH0106 | No. 2468 | TATTGCAGGACGGACCTGT | 0.212 |
| | AH9109 | No. 2469 | ATTGCAGGACGGACCTGTC | 0.210 |
| | AH0112 | No. 2472 | GCAGGACGGACCTGTCCCA | 0.225 |
| | AH0114 | No. 2474 | AGGACGGACCTGTCCCAAG | 0.155 |
| | AH0115 | No. 2475 | GGACGGACCTGTCCCAAGC | 0.073 |
| | AH0117 | No. 2417 | ACGGACCTGTCCCAAGCCA | 0.194 |
| | AH0118 | No. 2478 | CGGACCTGTCCCAAGCCAG | 0.111 |
| | AH0119 | No. 2479 | GGACCTGTCCCAAGCCAGA | 0.057 |
| | AH0120 | No. 2480 | GACCTGTCCCAAGCCAGAT | 0.136 |
| | AH0121 | No. 2481 | ACCTGTCCCAAGCCAGATG | 0.298 |
| | AH0122 | No. 2482 | CCTGTCCCAAGCCAGATGA | 0.111 |
| | AH0123 | No. 2483 | CTGTCCCAAGCCAGATGAT | 0 156 |
| | AH0124 | No. 2484 | TGTCCCAAGCCAGATGATT | 0.098 |
| | AH0125 | No. 2485 | GTCCCAAGCCAGATGATTT | 0.050 |
| | AH0126 | No. 2486 | TCCCAAGCCAGATGATTTA | 0.063 |
| | AH0127 | No. 2487 | CCCAAGCCAGATGATTTAC | 0.260 |
| | AH0128 | No. 2488 | CCAAGCCAGATGATTTACC | 0.326 |
| | AH0129 | No. 2489 | CAAGCCAGATGATTTACCA | 0.092 |
| | AH0130 | No. 2490 | AAGCCAGATGATTTACCAT | 0 098 |
| | AH0131 | No. 2491 | AGCCAGATGATTTACCATT | 0.147 |
| | AH0132 | No. 2492 | GCCAGATGATTTACCATTT | 0.116 |
| | AH0133 | No. 2493 | CCAGATGATTTACCATTTT | 0.062 |
| | AH0134 | No. 2494 | CAGATGATTTACCATTTTC | 0.074 |
| | AH0135 | No. 2495 | AGATGATTTACCATTTTCC | 0.122 |
| | AH0136 | No. 2496 | GATGATTTACCATTTTCCA | 0.114 |

TABLE 4-3

| Double | | | | |
|---|---|---|---|---|
| stranded | | | | |
| nucleic | | Sense strand sequence | | Antisense strand sequence |
| acid No. | SEQ ID NO. | (5′→3′) | SEQ ID NO. | (5′→3′) |
| AH0137 | No. 137 | AUGAUUUACCAUUUUCCACAG | No. 1317 | GUGGAAAAUGGUAAAUCAUCU |
| AH0138 | No. 138 | UGAUUUACCAUUUUCCACAGU | No. 1318 | UGUGGAAAAUGGUAAAUCAUC |
| AH0139 | No. 139 | GAUUUACCAUUUUCCACAGUG | No. 1319 | CUGUGGAAAAUGGUAAAUCAU |
| AH0143 | No. 143 | UACCAUUUUCCACAGUGGUCC | No. 1323 | ACCACUGUGGAAAAUGGUAAA |
| AH0144 | No. 144 | ACCAUUUUCCACAGUGGUCCC | No. 1324 | GACCACUGUGGAAAAUGGUAA |
| AH0145 | No. 145 | CCAUUUUCCACAGUGGUCCCG | No. 1325 | GGACCACUGUGGAAAAUGGUA |
| AH0149 | No. 149 | UUUCCACAGUGGUCCCGUUAA | No. 1329 | AACGGGACCACUGUGGAAAAU |
| AH0150 | No. 150 | UUCCACAGUGGUCCCGUUAAA | No. 1330 | UAACGGGACCACUGUGGAAAA |
| AH0151 | No. 151 | UCCACAGUGGUCCCGUUAAAA | No. 1331 | UUAACGGGACCACUGUGGAAA |
| AH01S2 | No. 152 | CCACAGUGGUCCCGUUAAAAA | No. 1332 | UUUAACGGGACCACUGUGGAA |
| AH0153 | No. 153 | CACAGUGGUCCCGUUAAAAAC | No. 1333 | UUUUAACGGGACCACUGUGGA |
| AH0154 | No. 154 | ACAGUGGUCCCGUUAAAAACA | No. 1334 | UUUUUAACGGGACCACUGUGG |
| AH0155 | No. 155 | CAGUGGUCCCGUUAAAAACAU | No. 1335 | GUUUUUAACGGGACCACUGUG |
| AH0156 | No. 156 | AGUGGUCCCGUUAAAAACAUU | No. 1336 | UGUUUUUAACGGGACCACUGU |
| AH0157 | No. 157 | GUGGUCCCGUUAAAAACAUUC | No. 1337 | AUGUUUUUAACGGGACCACUG |
| AH0158 | No. 158 | UGGUCCCGUUAAAAACAUUCU | No. 1338 | AAUGUUUUUAAGGGGACCACU |
| AH0159 | No. 159 | GGUCCCGUUAAAAACAUUCUA | No. 1339 | GAAUGUUUUUAACGGGACCAC |
| AH0160 | No. 160 | GUCCCGUUAAAAACAUUCUAU | No. 1340 | AGAAUGUUUUUAACGGGACCA |
| AH0161 | No. 161 | UCCCGUUAAAAACAUUCUAUG | No. 1341 | UAGAAUGUUUUUAACGGGACC |
| AH0162 | No. 162 | CCCGUUAAAAACAUUCUAUGA | No. 1342 | AUAGAAUGUUUUUAACGGGAC |
| AH0163 | No. 163 | CCGUUAAAAACAUUCUAUGAG | No. 1343 | CAUAGAAUGUUUUUAACGGGA |
| AH0164 | No. 164 | CGUUAAAAACAUUCUAUGAGC | No. 1344 | UCAUAGAAUGUUUUUAACGGG |
| AH0173 | No. 173 | CAUUCUAUGAGCCAGGAGAAG | No. 1353 | UCUCCUGGCUCAUAGAAUGUU |
| AH0114 | No. 174 | AUUCUAUGAGCCAGGAGAAGA | No. 1354 | UUCUCCUGGCUCAUAGAAUGU |
| AH0177 | No. 177 | CUAUGAGCCAGGAGAAGAGAU | No. 1357 | CUCUUCUCCUGGCUCAUAGAA |
| AH0178 | No. 178 | UAUGAGCCAGGAGAAGAGAUU | No. 1358 | UCUCUUCUCCUGGCUCAUAGA |
| AH0179 | No. 179 | AUGAGCCAGGAGAAGAGAUUA | No. 1359 | AUCUCUUCUCCUGGCUCAUAG |
| AH0180 | No. 180 | UGAGCCAGGAGAAGAGAUUAC | No. 1360 | AAUCUCUUCUCCUGGCUCAUA |
| AH0181 | No. 181 | GAGCCAGGAGAAGAGAUUACG | No. 1361 | UAAUCUCUUCUCCUGGCUCAU |
| AH0183 | No. 183 | GCCAGGAGAAGAGAUUACGUA | No. 1363 | CGUAAUCUCUUCUCCUGGCUC |
| AH0184 | No. 184 | CCAGGAGAAGAGAUUACGUAU | No. 1364 | ACGUAAUCUCUUCUCCUGGCU |
| AH0185 | No. 185 | CAGGAGAAGAGAUUACGUAUU | No. 1365 | UACGUAAUCUCUUCUCCUGGC |
| AH0186 | No. 186 | AGGAGAAGAGAUUACGUAUUC | No. 1366 | AUACGUAAUCUCUUCUCCUGG |
| AH0187 | No. 187 | GGAGAAGAGAUUACGUAUUCC | No. 1367 | AAUACGUAAUCUCUUCUCCUG |
| AH0188 | No. 188 | GAGAAGAGAUUACGUAUUCCU | No. 1368 | GAAUACGUAAUCUCUUCUCCU |
| AH0189 | No. 189 | AGAAGAGAUUACGUAUUCCUG | No. 1369 | GGAAUACGUAAUCUCUUCUCC |
| AH0190 | No. 190 | GAAGAGAUUACGUAUUCCUGC | No. 1370 | AGGAAUACGUAAUCUCUUCUC |
| AH0193 | No. 193 | GAGAUUACGUAUUCCUGCAAG | No. 1373 | UGCAGGAAUACGUAAUCUCUU |
| AH0194 | No. 194 | AGAUUACGUAUUCCUGCAAGC | No. 1374 | UUGCAGGAAUACGUAAUCUCU |
| AH0195 | No. 195 | GAUUACGUAUUCCUGCAAGCC | No. 1375 | CUUGCAGGAAUACGUAAUCUC |
| AH0199 | No. 199 | ACGUAUUCCUGCAAGCCGGGC | No. 1379 | CCGGCUUGCAGGAAUACGUAA |
| AH0203 | No. 203 | AUUCCUGCAAGCCGGGCUAUG | No. 1383 | UAGCCCGGCUUGCAGGAAUAC |
| AH0207 | No. 207 | CUGCAAGCCGGGCUAUGUGUC | No. 1387 | CACAUAGCCCGGCUUGCAGGA |
| AH0225 | No. 225 | GUCCCGAGGAGGGAUGAGAAA | No. 1405 | UCUCAUCCCUCCUCGGGACAC |
| AH0226 | No. 226 | UCCCGAGGAGGGAUGAGAAAG | No. 1406 | UUCUCAUCCCUCCUCGGGACA |
| AH0229 | No. 229 | CGAGGAGGGAUGAGAAAGUUU | No. 1409 | ACUUUCUCAUCCCUCCUCGGG |
| | Double | | | Relative |
| | stranded | | | expressed |
| | nucleic | | Target β2GPI | amount |
| | acid No. | SEQ ID NO. | mRNA sequence | of β2GPI |
| | AH0137 | No. 2497 | ATGATTTACCATTTTCCAC | 0.333 |
| | AH0138 | No. 2498 | TGATTTACCATTTTCCACA | 0.210 |
| | AH0139 | No. 2499 | GATTTACCATTTTCCACAG | 0.303 |
| | AH0143 | No. 2503 | TACCATTTTCCACAGTGGT | 0.298 |
| | AH0144 | No. 2504 | ACCATTTTCCACAGTGGTC | 0.155 |
| | AH0145 | No. 2505 | CCATTTTCCACAGTGGTCC | 0.305 |
| | AH0149 | No. 2509 | TTTCCACAGTGGTCCCGTT | 0.080 |
| | AH0150 | No. 2510 | TTCCACAGTGGTCCCGTTA | 0.184 |
| | AH0151 | No. 2511 | TCCACAGTGGTCCCGTTAA | 0.164 |
| | AH01S2 | No. 2512 | CCACAGTGGTCCCGTTAAA | 0.060 |
| | AH0153 | No. 2513 | CACAGTGGTCCCGTTAAAA | 0.198 |
| | AH0154 | No. 2514 | ACAGTGGTCCCGTTAAAAA | 0.077 |
| | AH0155 | No. 2515 | CAGTGGTCCCGTTAAAAAC | 0.062 |
| | AH0156 | No. 2516 | AGTGGTCCCGTTAAAAACA | 0.238 |
| | AH0157 | No. 2517 | GTGGTCCCGTTAAAAACAT | 0.130 |
| | AH0158 | No. 2518 | TGGTCCCGTTAAAAACATT | 0.145 |
| | AH0159 | No. 2519 | GGTCCCGTTAAAAACATTC | 0.266 |
| | AH0160 | No. 2520 | GTCCCGTTAAAAACATTCT | 0.265 |
| | AH0161 | No. 2521 | TCCCGTTAAAAACATTCTA | 0.116 |
| | AH0162 | No. 2522 | CCCGTTAAAAACATTCTAT | 0.096 |
| | AH0163 | No. 2523 | CCGTTAAAAACATTCTATG | 0.116 |
| | AH0164 | No. 2524 | CGTTAAAAACATTCTATGA | 0.109 |
| | AH0173 | No. 2533 | CATTCTATGAGCCAGGAGA | 0.131 |
| | AH0114 | No. 2534 | ATTCTATGAGCCAGGAGAA | 0.255 |
| | AH0177 | No. 2537 | CTATGAGCCAGGAGAAGAG | 0.168 |
| | AH0178 | No. 2538 | TATGAGCCAGGAGAAGAGA | 0.319 |
| | AH0179 | No. 2539 | ATGAGCCAGGAGAAGAGAT | 0.260 |
| | AH0180 | No. 2540 | TGAGCCAGGAGAAGAGATT | 0.128 |
| | AH0181 | No. 2541 | GAGCCAGGAGAAGAGATTA | 0.049 |
| | AH0183 | No. 2543 | GCCAGGAGAAGAGATTACG | 0.053 |
| | AH0184 | No. 2544 | CCAGGAGAAGAGATTACGT | 0.066 |
| | AH0185 | No. 2545 | CAGGAGAAGAGATTACGTA | 0.055 |
| | AH0186 | No. 2546 | AGGAGAAGAGATTACGTAT | 0.094 |
| | AH0187 | No. 2547 | GGAGAAGAGATTACGTATT | 0.071 |
| | AH0188 | No. 2548 | GAGAAGAGATTACGTATTC | 0.069 |
| | AH0189 | No. 2549 | AGAAGAGATTACGTATTCC | 0.168 |
| | AH0190 | No. 2550 | GAAGAGATTACGTATTCCT | 0.157 |
| | AH0193 | No. 2553 | GAGATTACGTATTCCTGCA | 0.070 |
| | AH0194 | No. 2554 | AGATTACGTATTCCTGCAA | 0.186 |
| | AH0195 | No. 2555 | GATTACGTATTCCTGCAAG | 0.095 |
| | AH0199 | No. 2559 | ACGTATTCCTGCAAGCCGG | 0.294 |
| | AH0203 | No. 2563 | ATTCCTGCAAGCCGGGCTA | 0.232 |
| | AH0207 | No. 2567 | CTGCAAGCCGGGCTATGTG | 0.341 |
| | AH0225 | No. 2585 | GTCCCGAGGAGGGATGAGA | 0.212 |
| | AH0226 | No. 2586 | TCCCGAGGAGGGATGAGAA | 0.133 |
| | AH0229 | No. 2589 | CGAGGAGGGATGAGAAAGT | 0.182 |

TABLE 4-4

| Double | | | | |
|---|---|---|---|---|
| stranded | | | | |
| nucleic | | Sense strand sequence | | Antisense strand sequence |
| acid No. | SEQ ID NO. | (5′→3′) | SEQ ID NO. | (5′→3′) |
| AH0230 | No. 230 | GAGGAGGGAUGAGAAAGUUUA | No. 1410 | AACUUUCUCAUCCCUCCUCGG |
| AH0231 | No. 231 | AGGAGGGAUGAGAAAGUUUAU | No. 1411 | AAACUUUCUCAUCCCUCCUCG |
| AH0232 | No. 232 | GGAGGGAUGAGAAAGUUUAUC | No. 1412 | UAAACUUUCUCAUCCCUCCUC |
| AH0233 | No. 233 | GAGGGAUGAGAAAGUUUAUCU | No. 1413 | AUAAACUUUCUCAUCCCUCCU |
| AH0234 | No. 234 | AGGGAUGAGAAAGUUUAUCUG | No. 1414 | GAUAAACUUUCUGAUCCCUCC |
| AH0235 | No. 235 | GGGAUGAGAAAGUUUAUCUGC | No. 1415 | AGAUAAACUUUCUCAUCCCUC |
| AH0236 | No. 236 | GGAUGAGAAAGUUUAUCUGCC | No. 1416 | CAGAUAAACUUUCUCAUCCCU |
| AH0242 | No. 242 | GAAAGUUUAUCUGGCCUCUCA | No. 1422 | AGAGGGCAGAUAAACUUUCUC |
| AH0244 | No. 244 | AAGUUUAUCUGCCGUCUCACA | No. 1424 | UGAGAGGGCAGAUAAACUUUC |
| AH0255 | No. 255 | CCCUCUCACAGGAGUGUGGCC | No. 1435 | CCACAGUCCUGUGAGAGGGCA |
| AH0260 | No. 260 | UCACAGGACUGUGGCCCAUCA | No. 1440 | AUGGGCCACAGUCCUGUGAGA |
| AH0262 | No. 262 | ACAGGACUGUGGCCCAUCAAC | No. 1442 | UGAUGGGCCACAGUCCUGUGA |
| AH0265 | No. 265 | GGACUGUGGCCCAUCAACACU | No. 1445 | UGUUGAUGGGCCACAGUCCUG |
| AH0266 | No. 256 | GACUGUGGCCCAUCAACACUC | No. 1446 | GUGUUGAUGGGCCACAGUCCU |
| AH0272 | No. 272 | GGCCCAUCAACACUCUGAAAU | No. 1452 | UUCAGAGUGUUGAUGGGCCAC |
| AH0274 | No. 274 | CCCAUCAACACUCUGAAAUGU | No. 1454 | AUUUCAGAGUGUUGAUGGGCC |
| AH0275 | No. 275 | CCAUCAACACUCUGAAAUGUA | No. 1455 | CAUUUCAGAGUGUUGAUGGGC |
| AH0276 | No. 276 | CAUCAACACUCUGAAAUGUAC | No. 1456 | ACAUUUCAGAGUGUUGAUGGG |
| AH0277 | No. 277 | AUCAACACUCUGAAAUGUACA | No. 1457 | UACAUUUCAGAGUGUUGAUGG |
| AH0279 | No. 279 | CAACACUCUGAAAUGUACACC | No. 1459 | UGUACAUUUCAGAGUGUUGAU |
| AH0283 | No. 283 | ACUCUGAAAUGUACACCCAGA | No. 1463 | UGGGUGUACAUUUCAGAGUGU |
| AH0285 | No. 285 | UCUGAAAUGUACACCCAGAGU | No. 1465 | UCUGGGUGUACAUUUCAGAGU |
| AH0288 | No. 288 | GAAAUGUACACCCAGAGUAUG | No. 1468 | UACUCUGGGUGUACAUUUCAG |
| AH0289 | No. 284 | AAAUGUACACCCAGAGUAUGU | No. 1469 | AUACUCUGGGUGUACAUUUCA |
| AH0291 | No. 291 | AUGUACACCCAGAGUAUGUCC | No. 1471 | ACAUACUCUGGGUGUACAUUU |
| AH0294 | No. 294 | UACACCCAGAGUAUGUCCUUU | No. 1474 | AGGACAUACUCUGGGUGUACA |
| AH0295 | No. 295 | ACACCCAGAGUAUGUCCUUUU | No. 1475 | AAGGACAUACUCUGGGUGUAC |
| AH0296 | No. 296 | CACCCAGAGUAUGUCCUUUUG | No. 1476 | AAAGGACAUACUCUGGGUGUA |
| AH0297 | No. 297 | ACCCAGAGUAUGUCCUUUUGC | No. 1477 | AAAAGGACAUACUCUGGGUGU |
| AH0298 | No. 298 | CCCAGAGUAUGUCCUUUUGCU | No. 1478 | CAAAAGGACAUACUCUGGGUG |
| AH0300 | No. 300 | CAGAGUAUGUCCUUUUGCUGG | No. 1480 | AGCAAAAGGACAUACUCUGGG |
| AH0301 | No. 301 | AGAGUAUGUCCUUUUGCUGGA | No. 1481 | CAGCAAAAGGACAUACUCUGG |
| AH0302 | No. 302 | GAGUAUGUCCUUUUGCUGGAA | No. 1482 | CCAGCAAAAGGACAUACUCUG |
| AH0303 | No. 303 | AGUAUGUCCUUUUGCUGGAAU | No. 1483 | UCCAGCAAAAGGACAUACUCU |
| AH0304 | No. 304 | GUAUGUCCUUUUGCUGGAAUC | No. 1484 | UUCCAGCAAAAGGACAUACUC |
| AH0306 | No. 306 | AUGUCCUUUUGCUGGAAUCUU | No. 1486 | GAUUCCAGCAAAAGGACAUAC |
| AH0307 | No. 307 | UGUCCUUUUGCUGGAAUCUUA | No. 1487 | AGAUUCCAGCAAAAGGACAUA |
| AH0308 | No. 308 | GUCCUUUUGCUGGAAUCUUAG | No. 1488 | AAGAUUCCAGCAAAAGGACAU |
| AH0309 | No. 309 | UCCUUUUGCUGGAAUCUUAGA | No. 1489 | UAAGAUUCCAGCAAAAGGACA |
| AH0310 | No. 310 | CCUUUUGCUGGAAUCUUAGAA | No. 1490 | CUAAGAUUCCAGCAAAAGGAC |
| AH0311 | No. 311 | CUUUUGCUGGAAUCUUAGAAA | No. 1491 | UCUAAGAUUCCAGCAAAAGGA |
| AH0314 | No. 314 | UUGCUGGAAUCUUAGAAAAUG | No. 1494 | UUUUCUAAGAUUCCAGCAAAA |
| AH0315 | No. 315 | UGCUGGAAUCUUAGAAAAUGG | No. 1495 | AUUUUCUAAGAUUCCAGCAAA |
| AH0316 | No. 316 | GCUGGAAUCUUAGAAAAUGGA | No. 1496 | CAUUUUCUAAGAUUCCAGCAA |
| AH0317 | No. 317 | CUGGAAUCUUAGAAAAUGGAG | No. 1497 | CCAUUUUCUAAGAUUCCAGCA |
| AH0318 | No. 318 | UGGAAUCUUAGAAAAUGGAGC | No. 1498 | UCCAUUUUCUAAGAUUCCAGC |
| | Double | | | Relative |
| | stranded | | | expressed |
| | nucleic | | Target β2GPI | amount |
| | acid No. | SEQ ID NO. | mRNA sequence | of β2GPI |
| | AH0230 | No. 2590 | GAGGAGGGATGAGAAAGTT | 0.290 |
| | AH0231 | No. 2591 | AGGAGGGATGAGAAAGTTT | 0.149 |
| | AH0232 | No. 2592 | GGAGGGATGAGAAAGTTTA | 0.080 |
| | AH0233 | No. 2593 | GAGGGATGAGAAAGTTTAT | 0.046 |
| | AH0234 | No. 2594 | AGGGATGAGAAAGTTTATC | 0.252 |
| | AH0235 | No. 2595 | GGGATGAGAAAGTTTATCT | 0.134 |
| | AH0236 | No. 2596 | GGATGAGAAAGTTTATCTG | 0.065 |
| | AH0242 | No. 2602 | GAAAGTTTATCTGCCCTCT | 0.318 |
| | AH0244 | No. 2604 | AAGTTTATGTGCCCTCTCA | 0.192 |
| | AH0255 | No. 2615 | CCCTCTCACAGGACTGTGG | 0.340 |
| | AH0260 | No. 2620 | TCACAGGACTGTGGCCCAT | 0.295 |
| | AH0262 | No. 2622 | ACAGGACTGTGGCCCATCA | 0.305 |
| | AH0265 | No. 2625 | GGACTGTGGCCCATCAACA | 0.137 |
| | AH0266 | No. 2626 | GACTGTGGCCCATCAACAC | 0.169 |
| | AH0272 | No. 2632 | GGCCCATCAACAGTCTGAA | 0.166 |
| | AH0274 | No. 2634 | CCCATCAACACTCTGAAAT | 0.253 |
| | AH0275 | No. 2635 | CCATCAACACTCTGAAATG | 0.068 |
| | AH0276 | No. 2636 | CATCAACACTCTGAAATGT | 0.165 |
| | AH0277 | No: 2637 | ATCAACACTCTGAAATGTA | 0.172 |
| | AH0279 | No. 2639 | CAACACTCTGAAATGTACA | 0.229 |
| | AH0283 | No. 2643 | ACTCTGAAATGTACACCCA | 0.288 |
| | AH0285 | No. 2645 | TCTGAAATGTACACCCAGA | 0.305 |
| | AH0288 | No. 2648 | GAAATGTACACCCAGAGTA | 0.221 |
| | AH0289 | No. 2649 | AAATGTACACCCAGAGTAT | 0.297 |
| | AH0291 | No. 2651 | ATGTACACCCAGAGTATGT | 0.209 |
| | AH0294 | No. 2654 | TACACCCAGAGTATGTCCT | 0.179 |
| | AH0295 | No. 2655 | ACACCCAGAGTATGTCCTT | 0.125 |
| | AH0296 | No. 2656 | CACCCAGAGTATGTCCTTT | 0.076 |
| | AH0297 | No. 2657 | ACCCAGAGTATGTCCTTTT | 0.139 |
| | AH0298 | No. 2658 | CCCAGAGTATGTCCTTTTG | 0.134 |
| | AH0300 | No. 2660 | CAGAGTATGTCCTTTTGCT | 0.125 |
| | AH0301 | No. 2661 | AGAGTATGTCCTTTTGCTG | 0.176 |
| | AH0302 | No. 2662 | GAGTATGTCCTTTTGCTGG | 0.076 |
| | AH0303 | No. 2663 | AGTATGTCCTTTTGCTGGA | 0.083 |
| | AH0304 | No. 2664 | GTATGTCCTTTTGCTGGAA | 0.156 |
| | AH0306 | No. 2666 | ATGTCCTTTTGCTGGAATC | 0.261 |
| | AH0307 | No. 2667 | TGTCCTTTTGCTGGAATCT | 0.168 |
| | AH0308 | No. 2668 | GTCCTTTTGCTGGAATCTT | 0.076 |
| | AH0309 | No. 2669 | TCCTTTTGCTGGAATCTTA | 0.072 |
| | AH0310 | No. 2670 | CCTTTTGCTGGAATCTTAG | 0.097 |
| | AH0311 | No. 2671 | CTTTTGCTGGAATCTTAGA | 0.198 |
| | AH0314 | No. 2674 | TTGCTGGAATCTTAGAAAA | 0.139 |
| | AH0315 | No. 2675 | TGCTGGAATCTTAGAAAAT | 0.132 |
| | AH0316 | No. 2676 | GCTGGAATCTTAGAAAATG | 0.102 |
| | AH0317 | No. 2677 | CTGGAATCTTAGAAAATGG | 0.304 |
| | AH0318 | No. 2678 | TGGAATCTTAGAAAATGGA | 0.122 |

TABLE 4-5

| Double | | | | |
|---|---|---|---|---|
| stranded | | | | |
| nucleic | | Sense strand sequence | | Antisense strand sequence |
| acid No. | SEQ ID NO. | (5′→3′) | SEQ ID NO. | (5′→3′) |
| AH0319 | No. 319 | GGAAUCUUAGAAAAUGGAGCC | No. 1499 | CUCCAUUUUCUAAGAUUCCAG |
| AH0324 | No. 324 | CUUAGAAAAUGGAGCCGUACG | No. 1504 | UACGGCUCCAUUUUCUAAGAU |
| AH0327 | No. 327 | AGAAAAUGGAGCCGUACGCUA | No. 1507 | GCGUACGGCUCCAUUUUCUAA |
| AH0328 | No. 328 | GAAAAUGGAGCCGUACGCUAU | No. 1508 | AGCGUACGGCUCCAUUUUCUA |
| AH0329 | No. 329 | AAAAUGGAGCCGUACGCUAUA | No. 1509 | UAGCGUACGGCUCCAUUUUCU |
| AH0330 | No. 330 | AAAUGGAGGCCUACGCUAUAC | No. 1510 | AUAGCGUACGGCUCCAUUUUC |
| AH0331 | No. 331 | AAUGGAGCCGUACGCUAUACG | No. 1511 | UAUAGCGUACGGCUCCAUUUU |
| AH0334 | No. 334 | GGAGCCGUACGCUAUACGACU | No. 1514 | UCGUAUAGCGUACGGGUCCAU |
| AH0335 | No. 335 | GAGCCGUACGCUAUACGACUU | No. 1515 | GUCGUAUAGCGUACGGCUCCA |
| AH0336 | NO. 336 | AGCCGUACGCUAUACGACUUU | No. 1516 | AGUCGUAUAGCGUACGGCUCC |
| AH0337 | No. 337 | GCCGUACGCUAUACGACUUUU | No. 1517 | AAGUCGUAUAGCGUACGGCUC |
| AH0338 | No. 338 | CCGUACGCUAUACGACUUUUG | No. 1518 | AAAGUCGUAUAGCGUACGGCU |
| AH0339 | No. 339 | CGUACGCUAUACGACUUUUGA | No. 1519 | AAAAGUCGUAUAGCGUACGGC |
| AH0340 | No. 340 | GUACGCUAUACGACUUUUGAA | No. 1520 | CAAAAGUCGUAUAGCGUACGG |
| AH0341 | No. 341 | UACGCUAUACGACUUUUGAAU | No. 1521 | UCAAAAGUCGUAUAGCGUACG |
| AH0342 | No. 342 | ACGCUAUACGACUUUUGAAUA | No. 1522 | UUCAAAAGUCGUAUAGCGUAC |
| AH0343 | No. 343 | CGCUAUACGACUUUUGAAUAU | No. 1523 | AUUCAAAAGUCGUAUAGCGUA |
| AH0345 | No. 345 | CUAUACGACUUUUGAAUAUCC | No. 1525 | AUAUUCAAAAGUCGUAUAGCG |
| AH0346 | No. 346 | UAUACGACUUUUGAAUAUCCC | No. 1526 | GAUAUUCAAAAGUCGUAUAGC |
| AH0349 | No. 349 | ACGACUUUUGAAUAUCCCAAC | No. 1529 | UGGGAUAUUCAAAAGUCGUAU |
| AH0350 | No. 350 | CGACUUUUGAAUAUCCCAACA | No. 1530 | UUGGGAUAUUCAAAAGUCGUA |
| AH0351 | No. 351 | GACUUUUGAAUAUCCCAACAC | No. 1531 | GUUGGGAUAUUCAAAAGUCGU |
| AH0352 | No. 352 | ACUUUUGAAUAUCCCAACACG | No. 1532 | UGUUGGGAUAUUCAAAAGUCG |
| AH0355 | No. 355 | UUUGAAUAUCCCAACACGAUC | No. 1535 | UCGUGUUGGGAUAUUCAAAAG |
| AH0356 | No. 356 | UUGAAUAUCCCAACACGAUCA | No. 1536 | AUCGUGUUGGGAUAUUCAAAA |
| AH0357 | No. 357 | UGAAUAUCCCAACACGAUCAG | No. 1537 | GAUCGUGUUGGGAUAUUCAAA |
| AH0358 | No. 358 | GAAUAUCCCAACACGAUCAGU | No. 1538 | UGAUCGUGUUGGGAUAUUCAA |
| AH0361 | No. 361 | UAUCCCAACACGAUCAGUUUU | No. 1541 | AACUGAUCGUGUUGGGAUAUU |
| AH0362 | No. 362 | AUCCCAACACGAUCAGUUUUU | No. 1542 | AAACUGAUCGUGUUGGGAUAU |
| AH0363 | No. 363 | UCCCAACACGAUCAGUUUUUC | No. 1543 | AAAACUGAUCGUGUUGGGAUA |
| AH0364 | No. 364 | CCCAACACGAUCAGUUUUUCU | No. 1544 | AAAAACUGAUCGUGUUGGGAU |
| AH0365 | No. 365 | CCAACACGAUCAGUUUUUCUU | No. 1545 | GAAAAACUGAUCGUGUUGGGA |
| AH0366 | No. 366 | CAACACGAUCAGUUUUUCUUG | No. 1546 | AGAAAAACUGAUCGUGUUGGG |
| AH0367 | No. 367 | AACACGAUCAGUUUUUCUUGU | No. 1547 | AAGAAAAACUGAUCGUGUUGG |
| AH0369 | No. 369 | CACGAUCAGUUUUUCUUGUAA | No. 1549 | ACAAGAAAAACUGAUCGUGUU |
| AH0370 | No. 370 | ACGAUCAGUUUUUCUUGUAAC | No. 1550 | UACAAGAAAAACUGAUCGUGU |
| AH0371 | No. 371 | CGAUCAGUUUUUCUUGUAACA | No. 1551 | UUACAAGAAAAACUGAUCGUG |
| AH0372 | No. 372 | GAUCAGUUUUUCUUGUAACAC | No. 1552 | GUUACAAGAAAAACUGAUCGU |
| AH0373 | No. 373 | AUCAGUUUUUCUUGUAACACU | No. 1553 | UGUUACAAGAAAAACUGAUCG |
| AH0375 | No. 375 | CAGUUUUUCUUGUAACACUGG | No. 1555 | AGUGUUACAAGAAAAACUGAU |
| AH0376 | No. 376 | AGUUUUUCUUGUAACACUGGG | No. 1556 | CAGUGUUACAAGAAAAACUGA |
| AH0382 | No. 382 | UCUUGUAACACUGGGUUUUAU | No. 1562 | AAAACCCAGUGUUACAAGAAA |
| AH0383 | No. 363 | CUUGUAACACUGGGUUUUAUC | No. 1563 | UAAAACCCAGUGUUACAAGAA |
| AH0384 | No. 364 | UUGUAACACUGGGUUUUAUCU | No. 1564 | AUAAAACCCAGUGUUACAAGA |
| AH0385 | No. 385 | UGUAACACUGGGUUUUAUCUG | No. 1565 | GAUAAAACCCAGUGUUACAAG |
| AH0386 | No. 386 | GUAACACUGGGUUUUAUCUGA | No. 1566 | AGAUAAAACCCAGUGUUACAA |
| | Double | | | Relative |
| | stranded | | | expressed |
| | nucleic | | Target β2GPI | amount |
| | acid No. | SEQ ID NO. | mRNA sequence | of β2GPI |
| | AH0319 | No. 2679 | GGAATCTTAGAAAATGGAG | 0.232 |
| | AH0324 | No. 2684 | CTTAGAAAATGGAGCCGTA | 0.125 |
| | AH0327 | No. 2687 | AGAAAATGGAGCCGTACGC | 0.334 |
| | AH0328 | No. 2688 | GAAAATGGAGCCGTACGCT | 0.153 |
| | AH0329 | No. 2689 | AAAATGGAGCCGTACGCTA | 0.063 |
| | AH0330 | No. 2690 | AAATGGAGCCGTACGCTAT | 0.182 |
| | AH0331 | No. 2691 | AATGGAGCCGTACGCTATA | 0.149 |
| | AH0334 | No. 2694 | GGAGCCGTACGCTATACGA | 0.164 |
| | AH0335 | No. 2695 | GAGCCGTACGCTATACGAC | 0.181 |
| | AH0336 | No. 2696 | AGCCGTACGCTATACGACT | 0.114 |
| | AH0337 | No. 2697 | GCCGTACGCTATACGACTT | 0.106 |
| | AH0338 | No. 2698 | CCGTACGCTATACGACTTT | 0.077 |
| | AH0339 | No. 2699 | CGTACGCTATACGACTTTT | 0.102 |
| | AH0340 | No. 2700 | GTACGCTATACGACTTTTG | 0.224 |
| | AH0341 | No. 2701 | TACGCTATACGACTTTTGA | 0.233 |
| | AH0342 | No. 2702 | ACGCTATACGACTTTTGAA | 0.120 |
| | AH0343 | No. 2703 | CGCTATACGACTTTTGAAT | 0.102 |
| | AH0345 | No. 2705 | CTATACGACTTTTGAATAT | 0.096 |
| | AH0346 | No. 2706 | TATACGACTTTTGAATATC | 0.220 |
| | AH0349 | No. 2709 | ACGACTTTTGAATATCCCA | 0.316 |
| | AH0350 | No. 2710 | CGACTTTTGAATATCCCAA | 0.120 |
| | AH0351 | No. 2711 | GACTTTTGAATATCCCAAC | 0.230 |
| | AH0352 | No. 2712 | ACTTTTGAATATCCCAACA | 0.114 |
| | AH0355 | No. 2715 | TTTGAATATCCCAACACGA | 0.293 |
| | AH0356 | No. 2716 | TTGAATATCCCAACACGAT | 0.131 |
| | AH0357 | No. 2717 | TGAATATCCCAACACGATC | 0.280 |
| | AH0358 | No. 2718 | GAATATCCCAACACGATCA | 0.113 |
| | AH0361 | No. 2721 | TATCCCAACACGATCAGTT | 0.244 |
| | AH0362 | No. 2722 | ATGCCAACACGATGAGTTT | 0.194 |
| | AH0363 | No. 2723 | TCCCAACACGATCAGTTTT | 0.332 |
| | AH0364 | No. 2724 | CCCAACACGATCAGTTTTT | 0.171 |
| | AH0365 | No. 2725 | CCAACACGATCAGTTTTTC | 0.165 |
| | AH0366 | No. 2726 | CAACACGATCAGTTTTTCT | 0.119 |
| | AH0367 | No. 2727 | AACACGATCAGTTTTTCTT | 0.216 |
| | AH0369 | No. 2729 | CACGATCAGTTTTTCTTGT | 0.131 |
| | AH0370 | No. 2730 | ACGATCAGTTTTTCTTGTA | 0.152 |
| | AH0371 | No. 2731 | CGATCAGTTTTTCTTGTAA | 0.077 |
| | AH0372 | No. 2732 | GATCAGTTTTTCTTGTAAC | 0.185 |
| | AH0373 | No. 2733 | ATCAGTTTTTCTTGTAACA | 0.141 |
| | AH0375 | No. 2735 | CAGTTTTTCTTGTAACACT | 0.139 |
| | AH0376 | No. 2736 | AGTTTTTCTTGTAACACTG | 0.233 |
| | AH0382 | No. 2742 | TCTTGTAACACTGGGTTTT | 0.134 |
| | AH0383 | No. 2743 | CTTGTAACACTGGGTTTTA | 0.134 |
| | AH0384 | No. 2744 | TTGTAACACTGGGTTTTAT | 0.074 |
| | AH0385 | No. 2745 | TGTAACACTGGGTTTTATC | 0.246 |
| | AH0386 | No. 2746 | GTAACACTGGGTTTTATCT | 0.137 |

TABLE 4-6

| Double | | | | |
|---|---|---|---|---|
| stranded | | | | |
| nucleic | | Sense strand sequence | | Antisense strand sequence |
| acid No. | SEQ ID NO. | (5′→3′) | SEQ ID NO. | (5′→3′) |
| AH0388 | No. 388 | AACACUGGGUUUUAUCUGAAU | No. 1568 | UCAGAUAAAACCCAGUGUUAC |
| AH0389 | No. 389 | ACACUGGGUUUUAUCUGAAUG | No. 1569 | UUCAGAUAAAACCCAGUGUUA |
| AH0390 | No. 390 | CACUGGGUUUUAUCUGAAUGG | No. 1570 | AUUCAGAUAAAACCCAGUGUU |
| AH0392 | No. 392 | CUGGGUUUUAUCUGAAUGGCG | No. 1572 | CCAUUCAGAUAAAACCCAGUG |
| AH0394 | No. 394 | GGGUUUUAUCUGAAUGGCGCU | No. 1574 | CGCCAUUCAGAUAAAACCCAG |
| AH0395 | No. 395 | GGUUUUAUCUGAAUGGCGCUG | No. 1575 | GCGCCAUUCAGAUAAAACCCA |
| AH0196 | No. 396 | GUUUUAUCUGAAUGGCGCUGA | No. 1576 | AGCGCCAUUCAGAUAAAACCC |
| AH0399 | No. 399 | UUAUCUGAAUGGCGCUGAUUC | No. 1579 | AUCAGCGCCAUUCAGAUAAAA |
| AH0402 | No. 402 | UCUGAAUGGCGCUGAUUCUGC | No. 1582 | AGAAUCAGCGCCAUUCAGAUA |
| AH0406 | No. 406 | AAUGGCGCUGAUUCUGCCAAG | No. 1586 | UGGCAGAAUCAGCGCCAUUCA |
| AH0409 | No. 409 | GGCGCUGAUUCUGCCAAGUGC | No. 1589 | ACUUGGCAGAAUCAGCGCCAU |
| AH0410 | No. 410 | GCGCUGAUUCUGCCAAGUGCA | No. 1590 | CACUUGGCAGAAUCAGCGCCA |
| AH0411 | No. 411 | CGCUGAUUCUGCCAAGUGCAC | No. 1591 | GCACUUGGCAGAAUCAGCGCC |
| AH0412 | No. 412 | GCUGAUUCUGCCAAGUGCACU | No. 1592 | UGCACUUGGCAGAAUCAGCGC |
| AH0413 | No. 413 | CUGAUUCUGCCAAGUGCACUG | No. 1593 | GUGCACUUGGCAGAAUCAGCG |
| AH0414 | No. 414 | UGAUUCUGCCAAGUGCACUGA | No. 1594 | AGUGCACUUGGCAGAAUCAGC |
| AH0415 | No. 415 | GAUUCUGCCAAGUGCACUGAG | No. 1595 | CAGUGCACUUGGCAGAAUCAG |
| AH0419 | No. 419 | CUGCCAAGUGCACUGAGGAAG | No. 1599 | UCCUCAGUGCACUUGGCAGAA |
| AH0420 | No. 420 | UGCCAAGUGCACUGAGGAAGG | No. 1600 | UUCCUCAGUGCACUUGGCAGA |
| AH0422 | No. 422 | CCAAGUGCACUGAGGAAGGAA | No. 1602 | CCUUCCUCAGUGCACUUGGCA |
| AH0423 | No. 423 | CAAGUGCACUGAGGAAGGAAA | No. 1603 | UCCUUCCUCAGUGCACUUGGC |
| AH0424 | No. 424 | AAGUGCACUGAGGAAGGAAAA | No. 1604 | UUCCUUCCUCAGUGCACUUGG |
| AH0425 | No. 425 | AGUGCACUGAGGAAGGAAAAU | No. 1605 | UUUCCUUCCUCAGUGCACUUG |
| AH0426 | No. 426 | GUGCACUGAGGAAGGAAAAUG | No. 1606 | UUUUCCUUCCUCAGUGCACUU |
| AH0427 | No. 427 | UGCACUGAGGAAGGAAAAUGG | No. 1607 | AUUUUCCUUCCUCAGUGCACU |
| AH0436 | No. 436 | GAAGGAAAAUGGAGCCCGGAG | No. 1616 | CCGGGCUCCAUUUUCCUUCCU |
| AH0449 | No. 449 | GCCCGGAGCUUCCUGUCUGUG | No. 1629 | CAGACAGGAAGCUCCGGGCUC |
| AH0450 | No. 450 | CCCGGAGCUUCCUGUCUGUGC | No. 1630 | ACAGACAGGAAGCUCCGGGCU |
| AH0453 | No. 453 | GGAGCUUCCUGUCUGUGCUCC | No. 1633 | AGCACAGACAGGAAGCUCCGG |
| AH0454 | No. 454 | GAGCUUCCUGUCUGUGCUCCC | No. 1634 | GAGCACAGACAGGAAGCUCCG |
| AH0457 | No. 457 | CUUCCUGUCUGUGCUCCCAUC | No. 1637 | UGGGAGCACAGACAGGAAGCU |
| AH0461 | No. 461 | CUGUCUGUGCUCCCAUCAUCU | No. 1641 | AUGAUGGGAGCACAGACAGGA |
| AH0463 | No. 463 | GUCUGUGCUCCCAUCAUCUGC | No. 1643 | AGAUGAUGGGAGCACAGACAG |
| AH0472 | No. 472 | CCCAUCAUCUGCCCUCCACCA | No. 1652 | GUGGAGGGCAGAUGAUGGGAG |
| AH0475 | No. 475 | AUCAUCUGCCCUCCACCAUCC | No. 1655 | AUGGUGGAGGGCAGAUGAUGG |
| AH0476 | No. 476 | UCAUCUGCCCUCCACCAUCCA | No. 1656 | GAUGGUGGAGGGCAGAUGAUG |
| AH0480 | No. 480 | CUGCCCUCCACCAUCCAUACC | No. 1660 | UAUGGAUGGUGGAGGGCAGAU |
| AH0484 | No. 484 | CCUCCACCAUCCAUACCUACG | No. 1664 | UAGGUAUGGAUGGUGGAGGGC |
| AH0487 | No. 487 | CCACCAUCCAUACCAUCGUUU | No. 1667 | ACGUAGGUAUGGAUGGUGGAG |
| AH0488 | No. 488 | CACCAUCCAUACCUACGUUUG | No. 1668 | AACGUAGGUAUGGAUGGUGGA |
| AH0489 | No. 489 | ACCAUCCAUACCUACGUUUGC | No. 1669 | AAACGUAGGUAUGGAUGGUGG |
| AH0490 | No. 490 | CCAUCCAUACCUACGUUUGCA | No. 1670 | CAAACGUAGGUAUGGAUGGUG |
| AH0491 | No. 491 | CAUCCAUACCUACGUUUGCAA | No. 1671 | GCAAACGUAGGUAUGGAUGGU |
| AH0492 | No. 492 | AUCCAUACCUACGUUUGCAAC | No. 1672 | UGCAAACGUAGGUAUGGAUGG |
| AH0493 | No. 493 | UCCAUACCUACGUUUGCAACA | No. 1673 | UUGCAAACGUAGGUAUGGAUG |
| AH0495 | No. 495 | CAUACCUACGUUUGCAACACU | No. 1675 | UGUUGCAAACGUAGGUAUGGA |
| | Double | | | Relative |
| | stranded | | | expressed |
| | nucleic | | Target β2GPI | amount |
| | acid No. | SEQ ID NO. | mRNA sequence | of β2GPI |
| | AH0388 | No. 2748 | AACACTGGGTTTTATCTGA | 0.107 |
| | AH0389 | No. 2749 | ACACTGGGTTTTATCTGAA | 0.275 |
| | AH0390 | No. 2750 | CACTGGGTTTTATCTGAAT | 0.294 |
| | AH0392 | No. 2752 | CTGGGTTTTATCTGAATGG | 0.254 |
| | AH0394 | No. 2754 | GGGTTTTATCTGAATGGCG | 0.080 |
| | AH0395 | No. 2755 | GGTTTTATCTGAATGGCGC | 0.139 |
| | AH0196 | No. 2756 | GTTTTATCTGAATGGCGCT | 0.169 |
| | AH0399 | No. 2759 | TTATCTGAATGGCGCTGAT | 0.113 |
| | AH0402 | No. 2762 | TCTGAATGGCGCTGATTCT | 0.335 |
| | AH0406 | No. 2766 | AATGGCGCTGATTCTGCCA | 0.177 |
| | AH0409 | No. 2769 | GGCGCTGATTCTGCCAAGT | 0.189 |
| | AH0410 | No. 2770 | GCGCTGATTCTGCCAAGTG | 0.251 |
| | AH0411 | No. 2771 | CGCTGATTCTGCCAAGTGC | 0.070 |
| | AH0412 | No. 2772 | GCTGATTCTGCCAAGTGCA | 0.104 |
| | AH0413 | No. 2773 | CTGATTCTGCCAAGTGCAC | 0.217 |
| | AH0414 | No. 2774 | TGATTCTGCCAAGTGCACT | 0.301 |
| | AH0415 | No. 2775 | GATTCTGCCAAGTGCACTG | 0.151 |
| | AH0419 | No. 2779 | CTGCCAAGTGCACTGAGGA | 0.097 |
| | AH0420 | No. 2780 | TGCCAAGTGCACTGAGGAA | 0.184 |
| | AH0422 | No. 2782 | CCAAGTGCACTGAGGAAGG | 0.243 |
| | AH0423 | No. 2783 | CAAGTGCACTGAGGAAGGA | 0.095 |
| | AH0424 | No. 2784 | AAGTGCACTGAGGAAGGAA | 0.166 |
| | AH0425 | No. 2785 | AGTGCACTGAGGAAGGAAA | 0.084 |
| | AH0426 | No. 2786 | GTGCACTGAGGAAGGAAAA | 0.299 |
| | AH0427 | No. 2787 | TGCACTGAGGAAGGAAAAT | 0.236 |
| | AH0436 | No. 2796 | GAAGGAAAATGGAGCCCGG | 0.337 |
| | AH0449 | No. 2809 | GCCCGGAGCTTCCTGTCTG | 0.166 |
| | AH0450 | No. 2810 | CCCGGAGCTTCCTGTCTGT | 0.138 |
| | AH0453 | No. 2813 | GGAGCTTCCTGTCTGTGCT | 0.128 |
| | AH0454 | No. 2814 | GAGCTTCCTGTCTGTGCTC | 0.203 |
| | AH0457 | No. 2817 | CTTCCTGTCTGTGCTCCCA | 0.244 |
| | AH0461 | No. 2821 | CTGTCTGTGCTCCCATCAT | 0.306 |
| | AH0463 | No. 2823 | GTCTGTGCTCCCATCATCT | 0.257 |
| | AH0472 | No. 2832 | CCCATCATCTGCCCTCCAC | 0.196 |
| | AH0475 | No. 2835 | ATCATCTGCCCTCCACCAT | 0.250 |
| | AH0476 | No. 2836 | TCATCTGCCCTCCACCATC | 0.249 |
| | AH0480 | No. 2840 | CTGCCCTCCACCATCCATA | 0.291 |
| | AH0484 | No. 2844 | CCTCCACCATCCATACCTA | 0.113 |
| | AH0487 | No. 2847 | CCACCATCCATACCTACGT | 0.213 |
| | AH0488 | No. 2848 | CACCATCCATACCTACGTT | 0.210 |
| | AH0489 | No. 2849 | ACCATCCATACCTACGTTT | 0.160 |
| | AH0490 | No. 2850 | CCATCCATACCTACGTTTG | 0.171 |
| | AH0491 | No. 2851 | CATCCATACCTACGTTTGC | 0.078 |
| | AH0492 | No. 2852 | ATCCATACCTACGTTTGCA | 0.153 |
| | AH0493 | No. 2853 | TCCATACCTACGTTTGCAA | 0.157 |
| | AH0495 | No. 2855 | CATACCTACGTTTGCAACA | 0.161 |

TABLE 4-7

| Double | | | | |
|---|---|---|---|---|
| stranded | | | | |
| nucleic | | Sense strand sequence | | Antisense strand sequence |
| acid No. | SEQ ID NO. | (5′→3′) | SEQ ID NO. | (5′→3′) |
| AH0498 | No. 498 | ACCUACGUUUGCAACACUUCG | No. 1678 | AAGUGUUGCAAACGUAGGUAU |
| AH0499 | No. 499 | CCUACGUUUGCAACACUUCGU | No. 1679 | GAAGUGUUGCAAACGUAGGUA |
| AH0500 | No. 500 | CUACGUUUGCAACACUUCGUG | No. 1680 | CGAAGUGUUGCAAACGUAGGU |
| AH0501 | No. 501 | UACGUUUGCAACACUUCGUGU | No. 1681 | ACGAAGUGUUGCAAACGUAGG |
| AH0502 | No. 502 | ACGUUUGCAACACUUCGUGUU | No. 1682 | CACGAAGUGUUGCAAACGUAG |
| AH0503 | No. 503 | CGUUUGCAACACUUCGUGUUU | No. 1683 | ACACGAAGUGUUGCAAACGUA |
| AH0504 | No. 504 | GUUUGCAACACUUCGUGUUUA | No. 1684 | AACACGAAGUGUUGCAAACGU |
| AH0505 | No. 505 | UUUGCAACACUUCGUGUUUAU | No. 1685 | AAACACGAAGUGUUGCAAACG |
| AH0506 | No. 506 | UUGCAACACUUCGUGUUUAUA | No. 1686 | UAAACACGAAGUGUUGCAAAC |
| AH0501 | No. 507 | UGCAACACUUCGUGUUUAUAA | No. 1687 | AUAAACACGAAGUGUUGCAAA |
| AH0508 | No. 508 | GCAACACUUCGUGUUUAUAAG | No. 1688 | UAUAAACACGAAGUGUUGCAA |
| AH0509 | No. 509 | CAACACUUCGUGUUUAUAAGC | No. 1689 | UUAUAAACACGAAGUGUUGCA |
| AH0510 | No. 510 | AACACUUCGUGUUUAUAAGCC | No. 1690 | CUUAUAAACACGAAGUGUUGC |
| AH0513 | No. 513 | ACUUCGUGUUUAUAAGCCAUC | No. 1693 | UGGCUUAUAAACACGAAGUGU |
| AH0514 | No. 514 | CUUCGUGUUUAUAAGCCAUCA | No. 1694 | AUGGCUUAUAAACACGAAGUG |
| AH0518 | No. 518 | GUGUUUAUAAGCCAUCAGCUG | No. 1698 | GCUGAUGGCUUAUAAACACGA |
| AH0519 | No. 519 | UGUUUAUAAGCCAUCAGCUGG | No. 1699 | AGCUGAUGGCUUAUAAACACG |
| AH0520 | No. 520 | GUUUAUAAGCCAUCAGCUGGA | No. 1700 | CAGCUGAUGGCUUAUAAACAC |
| AH0526 | No. 526 | AAGCCAUCAGCUGGAAACAAU | No. 1706 | UGUUUCCAGCUGAUGGCUUAU |
| AH0527 | No. 527 | AGCCAUCAGCUGGAAACAAUU | No. 1707 | UUGUUUCCAGCUCAUGGCUUA |
| AH0528 | No. 528 | GCCAUCAGCUGGAAACAAUUC | No. 1708 | AUUGUUUCCAGCUGAUGGCUU |
| AH0529 | No. 529 | CCAUCAGCUGGAAACAAUUCC | No. 1709 | AAUUGUUUCCAGCUGAUGGCU |
| AH0530 | No. 530 | CAUCAGCUGGAAACAAUUCCC | No. 1710 | GAAUUGUUUCCAGCUGAUGGC |
| AH0534 | No. 534 | AGCUGGAAACAAUUCCCUCUA | No. 1714 | GAGGGAAUUGUUUCCAGCUGA |
| AH0535 | No. 535 | GCUGGAAACAAUUCCCUCUAU | No. 1715 | AGAGGGAAUUGUUUCCAGCUG |
| AH0538 | No. 538 | GGAAACAAUUCCCUCUAUCGG | No. 1718 | GAUAGAGGGAAUUGUUUCCAG |
| AH0542 | No. 542 | ACAAUUCCCUCUAUCGGGACA | No. 1722 | UCCCGAUAGAGGGAAUUGUUU |
| AH0549 | No. 549 | CCUCUAUCGGGACACAGCAGU | No. 1729 | UGCUGUGUCCCGAUAGAGGGA |
| AH0552 | No. 552 | CUAUCGGGACACAGCAGUUUU | No. 1732 | AACUGCUGUGUCCCGAUAGAG |
| AH0553 | No. 553 | UAUCGGGACACAGCAGUUUUU | No. 1733 | AAACUGCUGUGUCCCGAUAGA |
| AH0554 | No. 554 | AUCGGGACACAGCAGUUUUUG | No. 1734 | AAAACUGCUGUGUCCCGAUAG |
| AH0555 | No. 555 | UCGGGACACAGCAGUUUUUGA | No. 1735 | AAAAACUGCUGUGUCCCGAUA |
| AH0551 | No. 557 | GGGACACAGCAGUUUUUGAAU | No. 1737 | UGAAAAACUGCUGUGUCCCGA |
| AH0558 | No. 558 | GGACACAGCAGUUUUUGAAUG | No. 1738 | UUCAAAAACUGCUGUGUCCCG |
| AH0559 | No. 559 | GACACAGCAGUUUUUGAAUGU | No. 1739 | AUUCAAAAACUGCUGUGUCCC |
| AH0561 | No. 561 | CACAGCAGUUUUUGAAUGUUU | No. 1741 | ACAUUCAAAAACUGCUGUGUC |
| AH0562 | No. 562 | ACAGCAGUUUUUGAAUGUUUG | No. 1742 | AACAUUCAAAAACUGCUGUGU |
| AH0563 | No. 563 | CAGCAGUUUUUGAAUGUUUGC | No. 1743 | AAACAUUCAAAAACUGCUGUG |
| AH0564 | No. 564 | AGCAGUUUUUGAAUGUUUGCC | No. 1744 | CAAACAUUCAAAAACUGCUGU |
| AH0565 | No. 565 | GCAGUUUUUGAAUGUUUGCCA | No. 1745 | GCAAACAUUCAAAAACUGCUG |
| AH0567 | No. 567 | AGUUUUUGAAUGUUUGCCACA | No. 1747 | UGGCAAACAUUCAAAAACUGC |
| AH0568 | No. 568 | GUUUUUGAAUGUUUGCCACAA | No. 1748 | GUGGCAAACAUUCAAAAACUG |
| AH0570 | No. 570 | UUUUGAAUGUUUGCCACAACA | No. 1750 | UUGUGGCAAACAUUCAAAAAC |
| AH0572 | No. 572 | UUGAAUGUUUGCCACAACAUG | No. 1752 | UGUUGUGGCAAACAUUCAAAA |
| AH0573 | No. 573 | UGAAUGUUUGCCACAACAUGC | No. 1753 | AUGUUGUGGCAAACAUUCAAA |
| AH0574 | No. 574 | GAAUGUUUGCCACAACAUGCG | No. 1754 | CAUGUUGUGGCAAACAUUCAA |
| | Double | | | Relative |
| | stranded | | | expressed |
| | nucleic | | Target β2GPI | amount |
| | acid No. | SEQ ID NO. | mRNA sequence | of β2GPI |
| | AH0498 | No. 2858 | ACCTACGTTTGCAACACTT | 0.214 |
| | AH0499 | No. 2859 | CCTACGTTTGCAACACTTC | 0.213 |
| | AH0500 | No. 2860 | CTACGTTTGCAACACTTCG | 0.150 |
| | AH0501 | No. 2861 | TACGTTTGCAACACTTCGT | 0.201 |
| | AH0502 | No. 2862 | ACGTTTGCAACACTTCGTG | 0.159 |
| | AH0503 | No. 2863 | CGTTTGCAACACTTCGTGT | 0.126 |
| | AH0504 | No. 2864 | GTTTGCAACACTTCGTGTT | 0.055 |
| | AH0505 | No. 2865 | TTTGCAACACTTCGTGTTT | 0.170 |
| | AH0506 | No. 2866 | TTGCAACACTTCGTGTTTA | 0.076 |
| | AH0501 | No. 2867 | TGCAACACTTCGTGTTTAT | 0.091 |
| | AH0508 | No. 2868 | GCAACACTTCGTGTTTATA | 0.146 |
| | AH0509 | No. 2869 | CAACACTTCGTGTTTATAA | 0.125 |
| | AH0510 | No. 2870 | AACACTTCGTGTTTATAAG | 0.330 |
| | AH0513 | No. 2873 | ACTTCGTGTTTATAAGCCA | 0.119 |
| | AH0514 | No. 2874 | CTTCGTGTTTATAAGCCAT | 0.118 |
| | AH0518 | No. 2878 | GTGTTTATAAGCCATCAGC | 0.233 |
| | AH0519 | No. 2879 | TGTTTATAAGCCATCAGCT | 0.297 |
| | AH0520 | No. 2880 | GTTTATAAGCCATCAGCTG | 0.216 |
| | AH0526 | No. 2886 | AAGCCATCAGCTGGAAACA | 0.299 |
| | AH0527 | No. 2887 | AGCCATCAGCTGGAAACAA | 0.258 |
| | AH0528 | No. 2888 | GCCATCAGCTGGAAACAAT | 0.091 |
| | AH0529 | No. 2889 | CCATCAGCTGGAAACAATT | 0.067 |
| | AH0530 | No. 2890 | CATCAGCTGGAAACAATTC | 0.229 |
| | AH0534 | No. 2894 | AGCTGGAAACAATTCCCTC | 0.183 |
| | AH0535 | No. 2895 | AGCTGGAAACAATTCCCTC | 0.202 |
| | AH0538 | No. 2898 | GGAAACAATTCCCTCTATC | 0.245 |
| | AH0542 | No. 2902 | ACAATTCCCTCTATCGGGA | 0.102 |
| | AH0549 | No. 2909 | CCTCTATCGGGACACAGCA | 0.275 |
| | AH0552 | No. 2912 | CTATCGGGACACAGCAGTT | 0.230 |
| | AH0553 | No. 2913 | TATCGGGACACAGCAGTTT | 0.789 |
| | AH0554 | No. 2914 | ATCGGGACACAGCAGTTTT | 0.324 |
| | AH0555 | No. 2915 | TCGGGACACAGCAGTTTTT | 0.203 |
| | AH0551 | No. 2917 | GGGACACAGCAGTTTTTGA | 0.208 |
| | AH0558 | No. 2918 | GGACACAGCAGTTTTTGAA | 0.237 |
| | AH0559 | No. 2919 | GACACAGCAGTTTTTGAAT | 0.226 |
| | AH0561 | No. 2921 | CACAGCAGTTTTTGAATGT | 0.151 |
| | AH0562 | No. 2922 | ACAGCAGTTTTTGAATGTT | 0.096 |
| | AH0563 | No. 2923 | CAGCAGTTTTTGAATGTTT | 0.077 |
| | AH0564 | No. 2924 | AGCAGTTTTTGAATGTTTG | 0.206 |
| | AH0565 | No. 2925 | GCAGTTTTTGAATGTTTGC | 0.080 |
| | AH0567 | No. 2927 | AGTTTTTGAATGTTTGCCA | 0.078 |
| | AH0568 | No. 2928 | GTTTTTGAATGTTTGCCAC | 0.250 |
| | AH0570 | No. 2930 | TTTTGAATGTTTGCCACAA | 0.286 |
| | AH0572 | No. 2932 | TTGAATGTTTGCCACAACA | 0.152 |
| | AH0573 | No. 2933 | TGAATGTTTGCCACAACAT | 0.266 |
| | AH0574 | No. 2934 | GAATGTTTGCCACAACATG | 0.142 |

TABLE 4-8

| Double | | | | |
|---|---|---|---|---|
| stranded | | | | |
| nucleic | | Sense strand sequence | | Antisense strand sequence |
| acid No. | SEQ ID NO. | (5′→3′) | SEQ ID NO. | (5′→3′) |
| AH0578 | No. 578 | GUUUGCCACAACAUGCGAUGU | No. 1758 | AUCGCAUGUUGUGGCAAACAU |
| AH0582 | No. 582 | GCCACAACAUGCGAUGUUUGG | No. 1762 | AAACAUCGCAUGUUGUGGCAA |
| AH0583 | No. 583 | CCACAACAUGCGAUGUUUGGA | No. 1763 | CAAACAUCGCAUGUUGUGGCA |
| AH0585 | No. 585 | ACAACAUGCGAUGUUUGGAAA | No. 1765 | UCCAAACAUCGCAUGUUGUGG |
| AH0586 | No. 586 | CAACAUGCGAUGUGUGGAAAU | No. 1766 | UUCCAAACAUCGCAUGUUGUG |
| AH0588 | No. 588 | ACAUGCGAUGUUUGGAAAUGA | No. 1768 | AUUUCCAAACAUCGCAUGUUG |
| AH0590 | No. 590 | AUGCGAUGUUUGGAAAUGAUA | No. 1770 | UCAUUUCCAAACAUCGCAUGU |
| AH0591 | No. 591 | UGCGAUGUUUGGAAAUGAUAC | No. 1771 | AUCAUUUCCAAACAUCGCAUG |
| AH0592 | No. 592 | GCGAUGUUUGGAAAUGAUACA | No. 1772 | UAUCAUUUCCAAACAUCGCAU |
| AH0593 | No. 593 | CGAUGUUUGGAAAUGAUACAA | No. 1773 | GUAUCAUUUCCAAACAUCGCA |
| AH0594 | No. 594 | GAUGUUUGGAAAUGAUACAAU | No. 1774 | UGUAUCAUUUCCAAACAUCGC |
| AH0595 | No. 595 | AUGUUUGGAAAUGAUACAAUU | No. 1775 | UUGUAUCAUUUCCAAACAUCG |
| AH0597 | No. 597 | GUUUGGAAAUGAUACAAUUAC | No. 1777 | AAUUGUAUCAUUUCCAAACAU |
| AH0598 | No. 598 | UUUGGAAAUGAUACAAUUACC | No. 1778 | UAAUUGUAUCAUUUCCAAACA |
| AH0601 | No. 601 | GGAAAUGAUACAAUUACCUGC | No. 1781 | AGGUAAUUGUAUCAUUUCCAA |
| AH0607 | No. 607 | GAUACAAUUACCUGCACGACA | No. 1787 | UCGUGCAGGUAAUUGUAUCAU |
| AH0609 | No. 609 | UACAAUUACCUGCACGACACA | No. 1789 | UGUCGUGCAGGUAAUUGUAUC |
| AH0610 | No. 610 | ACAAUUACCUGCACGACACAU | No. 1790 | GUGUCGUGCAGGUAAUUGUAU |
| AH0611 | No. 611 | CAAUUACCUGCACGACACAUG | No. 1791 | UGUGUCGUGCAGGUAAUUGUA |
| AH0612 | No. 612 | AAUUACCUGCACGACACAUGG | No. 1792 | AUGUGUCGUGCAGGUAAUUGU |
| AH0616 | No. 616 | ACCUGCACGACACAUGGAAAU | No. 1796 | UUCCAUGUGUCGUGCAGGUAA |
| AH0617 | No. 617 | CCUGCACGACACAUGGAAAUU | No. 1797 | UUUCCAUGUGUCGUGCAGGUA |
| AH0618 | No. 618 | CUGCACGACACAUGGAAAUUG | No. 1798 | AUUUCCAUGUGUCGUGCAGGU |
| AH0622 | No. 622 | ACGACACAUGGAAAUUGGACU | No. 1802 | UCCAAUUUCCAUGUGUCGUGC |
| AH0624 | No. 624 | GACACAUGGAAAUUGGACUAA | No. 1804 | AGUCCAAUUUCCAUGUGUCGU |
| AH0625 | No. 625 | ACACAUGGAAAUUGGACUAAA | No. 1805 | UAGUCCAAUUUCCAUGUGUCG |
| AH0627 | No. 627 | ACAUGGAAAUUGGACUAAAUU | No. 1807 | UUUAGUCCAAUUUCCAUGUGU |
| AH0628 | No. 628 | CAUGGAAAUUGGACUAAAUUA | No. 1808 | AUUUAGUCCAAUUUCCAUGUG |
| AH0629 | No. 629 | AUGGAAAUUGGACUAAAUUAC | No. 1809 | AAUUUAGUCCAAUUUCCAUGU |
| AH0630 | No. 630 | UGGAAAUUGGACUAAAUUACC | No. 1810 | UAAUUUAGUCCAAUUUCCAUG |
| AH0631 | No. 631 | GGAAAUUGGACUAAAUUACCA | No. 1811 | GUAAUUUAGUCCAAUUUCCAU |
| AH0633 | No. 633 | AAAUUGGACUAAAUUACCAGA | No. 1813 | UGGUAAUUUAGUCCAAUUUCC |
| AH0638 | No. 638 | GGACUAAAUUACCAGAAUGCA | No. 1818 | CAUUCUGGUAAUUUAGUCCAA |
| AH0649 | No. 649 | CCAGAAUGCAGGGAAGUAAAA | No. 1829 | UUACUUCCCUGCAUUCUGGUA |
| AH0650 | No. 650 | CAGAAUGCAGGGAAGUAAAAU | No. 1830 | UUUACUUCCCUGCAUUCUGGU |
| AH0651 | No. 651 | AGAAUGCAGGGAAGUAAAAUG | No. 1831 | UUUUACUUCCCUGCAUUCUGG |
| AH0652 | No. 652 | GAAUGCAGGGAAGUAAAAUGC | No. 1832 | AUUUUACUUCCCUGCAUUCUG |
| AH0653 | No. 653 | AAUGCAGGGAAGUAAAAUGCC | No. 1833 | CAUUUUACUUCCCUGCAUUCU |
| AH0657 | No. 657 | CAGGGAAGUAAAAUGCCCAUU | No. 1837 | UGGGCAUUUUACUUCCCUGCA |
| AH0661 | No. 661 | GAAGUAAAAUGCCCAUUCCCA | No. 1841 | GGAAUGGGCAUUUUACUUCCC |
| AH0664 | No. 664 | GUAAAAUGCCCAUUCCCAUCA | No. 1844 | AUGGGAAUGGGCAUUUUACUU |
| AH0669 | No. 669 | AUGCCCAUCCCCAUCAAGACC | No. 1849 | UCUUGAUGGGAAUGGGCAUUU |
| AH0610 | No. 670 | UGCCCAUUCCCAUCAAGACCA | No. 1850 | GUCUUGAUGGGAAUGGGCAUU |
| AH0672 | No. 672 | CCCAUUCCCAUCAAGACCAGA | No. 1852 | UGGUCUUGAUGGGAAUGGGCA |
| AH0673 | No. 673 | CCAUUCCCAUCAAGACCAGAC | No. 1853 | CUGGUCUUGAUGGGAAUGGGC |
| AH0674 | No. 674 | CAUUCCCAUCAAGACCAGACA | No. 1854 | UCUGGUCUUGAUGGGAAUGGG |
| | Double | | | Relative |
| | stranded | | | expressed |
| | nucleic | | Target β2GPI | amount |
| | acid No. | SEQ ID NO. | mRNA sequence | of β2GPI |
| | AH0578 | No. 2938 | GTTTGCCACAACATGCGAT | 0.120 |
| | AH0582 | No. 2942 | GCCACAACATGCGATGTTT | 0.208 |
| | AH0583 | No. 2943 | CCACAACATGCGATGTTTG | 0.222 |
| | AH0585 | No. 2945 | ACAAGATGCGATGTTTGGA | 0.188 |
| | AH0586 | No. 2946 | CAACATGCGATGTTTGGAA | 0.151 |
| | AH0588 | No. 2948 | ACATGCGATGTTTGGAAAT | 0.261 |
| | AH0590 | No. 2950 | ATGCGATGTTTGGAAATGA | 0.248 |
| | AH0591 | No. 2951 | TGCGATGTTTGGAAATGAT | 0.183 |
| | AH0592 | No. 2952 | GCGATGTTTGGAAATGATA | 0.098 |
| | AH0593 | No. 2953 | CGATGTTTGGAAATGATAC | 0.135 |
| | AH0594 | No. 2954 | GATGTTTGGAAATGATACA | 0.114 |
| | AH0595 | No. 2955 | ATGTTTGGAAATGATACAA | 0.333 |
| | AH0597 | No. 2957 | GTTTGGAAATGATACAATT | 0.343 |
| | AH0598 | No. 2958 | TTTGGAAATGATACAATTA | 0.166 |
| | AH0601 | No. 2961 | GGAAATGATACAATTACCT | 0.177 |
| | AH0607 | No. 2967 | GATACAATTACCTGCACGA | 0.093 |
| | AH0609 | No. 2969 | TACAATTACCTGCACGACA | 0.159 |
| | AH0610 | No. 2970 | ACAATTACCTGCACGACAC | 0.159 |
| | AH0611 | No. 2971 | CAATTACCTGCACGACACA | 0.156 |
| | AH0612 | No. 2972 | AATTACCTGCACGACACAT | 0.257 |
| | AH0616 | No. 2976 | ACCTGCACGACACATGGAA | 0.292 |
| | AH0617 | No. 2977 | CCTGCACGACACATGGAAA | 0.143 |
| | AH0618 | No. 2978 | CTGCACGACACATGGAAAT | 0.118 |
| | AH0622 | No. 2982 | ACGACACATGGAAATTGGA | 0.310 |
| | AH0624 | No. 2984 | GACACATGGAAATTGGACT | 0.240 |
| | AH0625 | No. 2985 | ACACATGGAAATTGGACTA | 0.184 |
| | AH0627 | No. 2987 | ACATGGAAATTGGACTAAA | 0.104 |
| | AH0628 | No. 2988 | CATGGAAATTGGACTAAAT | 0.163 |
| | AH0629 | No. 2989 | ATGGAAATTGGACTAAATT | 0.298 |
| | AH0630 | No. 2990 | TGGAAATTGGACTAAATTA | 0.215 |
| | AH0631 | No. 2991 | GGAAATTGGACTAAATTAC | 0.307 |
| | AH0633 | No. 2993 | AAATTGGACTAAATTACCA | 0.306 |
| | AH0638 | No. 2998 | GGACTAAATTACCAGAATG | 0.128 |
| | AH0649 | No. 3009 | CCAGAATGCAGGGAAGTAA | 0.139 |
| | AH0650 | No. 3010 | CAGAATGCAGGGAAGTAAA | 0.126 |
| | AH0651 | No. 3011 | AGAATGCAGGGAAGTAAAA | 0.117 |
| | AH0652 | No. 3012 | GAATGCAGGGAAGTAAAAT | 0.331 |
| | AH0653 | No. 3013 | AATGCAGGGAAGTAAAATG | 0.198 |
| | AH0657 | No. 3017 | CAGGGAAGTAAAATGCCCA | 0.139 |
| | AH0661 | No. 3021 | GAAGTAAAATGCCCATTCC | 0.321 |
| | AH0664 | No. 3024 | GTAAAATGCCCATTCCCAT | 0.091 |
| | AH0669 | No. 3029 | ATGCCCATTCCCATCAAGA | 0.249 |
| | AH0610 | No. 3030 | TGCCCATTCCCATCAAGAC | 0.160 |
| | AH0672 | No. 3032 | CCCATTCCCATCAAGACCA | 0.097 |
| | AH0673 | No. 3033 | CCATTCCCATCAAGACCAG | 0.137 |
| | AH0674 | No. 3034 | CATTCCCATCAAGACCAGA | 0.335 |

TABLE 4-9

| Double | | | | |
|---|---|---|---|---|
| stranded | | | | |
| nucleic | | Sense strand sequence | | Antisense strand sequence |
| acid No. | SEQ ID NO. | (5′→3′) | SEQ ID NO. | (5′→3′) |
| AH0678 | No. 678 | CCCAUCAAGACCAGACAAUGG | No. 1858 | AUUGUCUGGUCUUGAUGGGAA |
| AH8679 | No. 679 | CCAUCAAGACCAGACAAUGGA | No. 1859 | CAUUGUCUGGUCUUGAUGGGA |
| AH0680 | No. 680 | CAUCAAGACCAGACAAUGGAU | No. 1860 | CCAUUGUCUGGUCUUGAUGGG |
| AH0681 | No. 681 | AUCAAGACCAGACAAUGGAUU | No. 1861 | UCCAUUGUCUGGUCUUGAUGG |
| AH0662 | No. 682 | UCAAGACCAGACAAUGGAUUU | No. 1862 | AUCCAUUGUCUGGUCUUGAUG |
| AH0683 | No. 683 | CAAGACCAGACAAUGGAUUUG | No. 1863 | AAUCCAUUGUCUGGUCUUGAU |
| AH0684 | No. 684 | AAGACCAGACAAUGGAUUUGU | No. 1864 | AAAUCCAUUGUCUGGUCUUGA |
| AH0685 | No. 685 | AGACCAGACAAUGGAUUUGUG | No. 1865 | CAAAUCCAUUGUCUGGUCUUG |
| AH0687 | No. 687 | ACCAGACAAUGGAUUUGUGAA | No. 1867 | CACAAAUCCAUUGUCUGGUCU |
| AH0688 | No. 688 | CCAGACAAUGGAUUUGUGAAC | No. 1868 | UCACAAAUCCAUUGUCUGGUC |
| AH0689 | No. 689 | CAGACAAUGGAUUUGUGAACU | No. 1869 | UUCACAAAUCCAUUGUCUGGU |
| AH0690 | No. 690 | AGACAAUGGAUUUGUGAACUA | No. 1870 | GUUCACAAAUCCAUUGUCUGG |
| AH0692 | No. 692 | ACAAUGGAUUUGUGAACUAUC | No. 1872 | UAGUUCACAAAUCCAUUGUCU |
| AH0693 | No. 693 | CAAUGGAUUUGUGAACUAUCC | No. 1873 | AUAGUUCACAAAUCCAUUGUC |
| AH0694 | No. 694 | AAUGGAUCUGUGAACUAUCCU | No. 1874 | GAUAGUUCACAAAUCCAUUGU |
| AH0691 | No. 697 | GGAUUUGUGAACUAUCCUGCA | No. 1877 | CAGGAUAGUUCACAAAUCCAU |
| AH0699 | No. 699 | AUUUGUGAACUAUCCUGCAAA | No. 1879 | UGCAGGAUAGUUCACAAAUCC |
| AH0700 | No. 700 | UUUGUGAACUAUCCUGCAAAA | No. 1880 | UUGCAGGAUAGUUCACAAAUC |
| AH0701 | No. 701 | UUGUGAACUAUCCUGCAAAAC | No. 1881 | UUUGCAGGAUAGUUCACAAAU |
| AH0702 | No. 702 | UGUGAACUAUCCUGCAAAACC | No. 1882 | UUUUGCAGGAUAGUUCACAAA |
| AH0705 | No. 705 | GAACUAUCCUGCAAAACCAAC | No. 1885 | UGGUUUUGCAGGAUAGUUCAC |
| AH0706 | No. 706 | AACUAUCCUGCAAAACCAACA | No. 1886 | UUGGUUUUGCAGGAUAGUUCA |
| AH0708 | No. 708 | CUAUCCUGCAAAACCAACACU | No. 1888 | UGUUGGUUUUGCAGGAUAGUU |
| AH0709 | No. 709 | UAUCCUGCAAAACCAACACUU | No. 1889 | GUGUUGGUUUUGCAGGAUAGU |
| AH0711 | No. 711 | UCCUGCAAAACCAACACUUUA | No. 1891 | AAGUGUUGGUUUUGCAGGAUA |
| AH0712 | No. 712 | CCUGCAAAACCAACACUUUAU | No. 1892 | AAAGUGUUGGUUUUGCAGGAU |
| AH0713 | No. 713 | CUGCAAAACCAACACUUUAUU | No. 1893 | UAAAGUGUUGGUUUUGCAGGA |
| AH0714 | No. 714 | UGCAAAACCAACACUUUAUUA | No. 1894 | AUAAAGUGUUGGUUUUGCAGG |
| AH0715 | No. 715 | GCAAAACCAACACUUUAUUAC | No. 1895 | AAUAAAGUGUUGGUUUUGCAG |
| AH0716 | No. 716 | CAAAACCAACACUUUAUUACA | No. 1896 | UAAUAAAGUGUUGGUUUUGCA |
| AH0718 | No. 718 | AAACCAACACUUUAUUACAAG | No. 1898 | UGUAAUAAAGUGUUGGUUUUG |
| AH0119 | No. 719 | AACCAACACUUUAUUACAAGG | No. 1899 | UUGUAAUAAAGUGUUGGUUUU |
| AH0721 | No. 721 | CCAACACUUUAUUACAAGGAU | No. 1901 | CCUUGUAAUAAAGUGUUGGUU |
| AH0723 | No. 723 | AACACUUUAUUACAAGGAUAA | No. 1903 | AUCCUUGUAAUAAAGUGUUGG |
| AH0724 | No. 724 | ACACUUUAUUACAAGGAUAAA | No. 1904 | UAUCCUUGUAAUAAAGUGUUG |
| AH0725 | No. 725 | CACUUUAUUACAAGGAUAAAG | No. 1905 | UUAUCCUUGUAAUAAAGUGUU |
| AH0735 | No. 735 | CAAGGAUAAAGCCACAUUUGG | No. 1915 | AAAUGUGGCUUUAUCCUUGUA |
| AH0737 | No. 737 | AGGAUAAAGCCACAUUUGGCU | No. 1917 | CCAAAUGUGGCUUUAUCCUUG |
| AH0739 | No. 739 | GAUAAAGCCACAUUUGGCUGC | No. 1919 | AGCCAAAUGUGGCUUUAUCCU |
| AH0743 | No. 743 | AAGCCACAUUUGGCUGCCAUG | No. 1923 | UGGCAGCCAAAUGUGGCUUUA |
| AH0744 | No. 744 | AGCCACAUUUGGCUGCCAUGA | No. 1924 | AUGGCAGCCAAAUGUGGCUUU |
| AH0745 | No. 745 | GCCACAUUUGGCUGCCAUGAU | No. 1925 | CAUGGGAGCCAAAUGUGGCUU |
| AH0746 | No. 746 | CCACAUUUGGCUGCCAUGAUG | No. 1926 | UCAUGGCAGCCAAAUGUGGCU |
| AH0747 | No. 747 | CACAUUUGGCUGCCAUGAUGG | No. 1927 | AUCAUGGCAGCCAAAUGUGGC |
| AH0748 | No. 748 | ACAUUUGGCUGCCAUGAUGGA | No. 1928 | CAUCAUGGCAGCCAAAUGUGG |
| AH0749 | No. 749 | CAUUUGGCUGCCAUGAUGGAU | No. 1929 | CCAUCAUGGCAGCCAAAUGUG |
| | Double | | | Relative |
| | stranded | | | expressed |
| | nucleic | | Target β2GPI | amount |
| | acid No. | SEQ ID NO. | mRNA sequence | of β2GPI |
| | AH0678 | No. 3038 | CCCATCAAGACCAGACAAT | 0.139 |
| | AH8679 | No. 3039 | CCATCAAGACCAGACAATG | 0.148 |
| | AH0680 | No. 3040 | CATCAAGACCAGACAATGG | 0.286 |
| | AH0681 | No. 3041 | ATCAAGACCAGACAATGGA | 0.159 |
| | AH0662 | No. 3042 | TCAAGACCAGACAATGGAT | 0.218 |
| | AH0683 | No. 3043 | CAAGACCAGACAATGGATT | 0.096 |
| | AH0684 | No. 3044 | AAGACCAGACAATGGATTT | 0.220 |
| | AH0685 | No. 3045 | AGACCAGACAATGGATTTG | 0.135 |
| | AH0687 | No. 3041 | ACCAGACAATGGATTTGTG | 0.146 |
| | AH0688 | No. 3048 | CCAGACAATGGATTTGTGA | 0.114 |
| | AH0689 | No. 3049 | CAGACAATGGATTTGTGAA | 0.067 |
| | AH0690 | No. 3050 | AGACAATGGATTTGTGAAC | 0.280 |
| | AH0692 | No. 3052 | ACAATGGATTTGTGAACTA | 0.296 |
| | AH0693 | No. 3053 | CAATGGATTTGTGAACTAT | 0.086 |
| | AH0694 | No. 3054 | AATGGATTTGTGAACTATC | 0.267 |
| | AH0691 | No. 3057 | GGATTTGTGAACTATCCTG | 0.196 |
| | AH0699 | No. 3059 | ATTTGTGAACTATCCTGCA | 0.268 |
| | AH0700 | No. 3060 | TTTGTGAACTATCCTGCAA | 0.319 |
| | AH0701 | No. 3061 | TTGTGAACTATCCTGCAAA | 0.112 |
| | AH0702 | No. 3062 | TGTGAACTATCCTGCAAAA | 0.231 |
| | AH0705 | No. 3065 | GAACTATCCTGCAAAACCA | 0.057 |
| | AH0706 | No. 3066 | AACTATCCTGCAAAACCAA | 0.092 |
| | AH0708 | No. 3068 | CTATCCTGCAAAACCAACA | 0.088 |
| | AH0709 | No. 3069 | TATCCTGCAAAACCAACAC | 0.340 |
| | AH0711 | No. 3071 | TCCTGCAAAACCAACACTT | 0.146 |
| | AH0712 | No. 3072 | CCTGCAAAACCAACACTTT | 0.060 |
| | AH0713 | No. 3073 | CTGCAAAACCAACACTTTA | 0.059 |
| | AH0714 | No. 3074 | TGCAAAACCAACACTTTAT | 0.092 |
| | AH0715 | No. 3075 | GCAAAACCAACACTTTATT | 0.183 |
| | AH0716 | No. 3076 | CAAAACCAACACTTTATTA | 0.189 |
| | AH0718 | No. 3078 | AAACCAACACTTTATTACA | 0.133 |
| | AH0119 | No. 3079 | AACCAACACTTTATTACAA | 0.202 |
| | AH0721 | No. 3081 | CCAACACTTTATTACAAGG | 0.247 |
| | AH0723 | No. 3083 | AACACTTTATTACAAGGAT | 0.174 |
| | AH0724 | No. 3084 | ACACTTTATTACAAGGATA | 0.090 |
| | AH0725 | No. 3085 | CACTTTATTACAAGGATAA | 0.146 |
| | AH0735 | No. 3095 | CAAGGATAAAGCCACATTT | 0.134 |
| | AH0737 | No. 3097 | AGGATAAAGCCACATTTGG | 0.321 |
| | AH0739 | No. 3099 | GATAAAGCCACATTTGGCT | 0.304 |
| | AH0743 | No. 3103 | AAGCCACATTTGGCTGCCA | 0.216 |
| | AH0744 | No. 3104 | AGCCACATTTGGCTGCCAT | 0.306 |
| | AH0745 | No. 3105 | GCCACATTTGGCTGCCATG | 0.112 |
| | AH0746 | No. 3106 | CCACATTTGGCTGCCATGA | 0.342 |
| | AH0747 | No. 3107 | CACATTTGGCTGGCATGAT | 0.185 |
| | AH0748 | No. 3108 | ACATTTGGCTGCCATGATG | 0.107 |
| | AH0749 | No. 3109 | CATTTGGCTGCCATGATGG | 0.214 |

TABLE 4-10

| Double | | | | |
|---|---|---|---|---|
| stranded | | | | |
| nucleic | | Sense strand sequence | | Antisense strand sequence |
| acid No. | SEQ ID NO. | (5′→3′) | SEQ ID NO. | (5′→3′) |
| AH0750 | No. 750 | AUUUGGCUGCCAUGAUGGAUA | No. 1930 | UCCAUCAUGGCAGCCAAAUGU |
| AH0753 | No. 753 | UGGCUGCCAUGAUGGAUAUUC | No. 1933 | AUAUCCAUCAUGGCAGCCAAA |
| AH0754 | No. 758 | GGCUGCCAUGAUGGAUAUUCU | No. 1934 | AAUAUCCAUCAUGGCAGCCAA |
| AH0756 | No. 756 | CUGCCAUGAUGGAUAUUCUCU | No. 1936 | AGAAUAUCCAUCAUGGCAGCC |
| AH0757 | No. 757 | UGCCAUGAUGGAUAUUCUCUG | No. 1937 | GAGAAUAUCCAUCAUGGCAGC |
| AH0759 | No. 759 | CCAUGAUGGAUAUUCUCUGGA | No. 1939 | CAGAGAAUAUCCAUCAUGGCA |
| AH0760 | No. 760 | CAUGAUGGAUAUUCUCUGGAU | No. 1940 | CCAGAGAAUAUCCAUCAUGGC |
| AH0762 | No. 762 | UGAUGGAUAUUCUCUGGAUGG | No. 1942 | AUCCAGAGAAUAUCCAUCAUG |
| AH0763 | No. 763 | GAUGGAUAUUCUCUGGAUGGC | No. 1943 | CAUCCAGAGAAUAUCCAUCAU |
| AH0766 | No. 766 | GGAUAUUCUCUGGAUGGCCCG | No. 1946 | GGCCAUCCAGAGAAUAUCCAU |
| AH0771 | No. 771 | UUCUCUGGAUGGCCCGGAAGA | No. 1951 | UUCCGGGCCAUCCAGAGAAUA |
| AH0773 | No. 773 | CUCUGGAUGGCCCGGAAGAAA | No. 1953 | UCUUCCGGGCCAUCCAGAGAA |
| AH0774 | No. 774 | UCUGGAUGGCCCGGAAGAAAU | No. 1954 | UUCUUCCGGGCCAUCCAGAGA |
| AH0775 | No. 775 | CUGGAUGGCCCGGAAGAAAUA | No. 1955 | UUUCUUCCGGGCCAUCCAGAG |
| AH0776 | No. 776 | UGGAUGGCCCGGAAGAAAUAG | No. 1956 | AUUUCUUCCGGGCCAUCCAGA |
| AH0777 | No. 777 | GGAUGGCCCGGAAGAAAUAGA | No. 1957 | UAUUUCUUCCGGGCCAUCCAG |
| AH0779 | No. 779 | AUGGCCCGGAAGAAAUAGAAU | No. 1959 | UCUAUUUCUUCCGGGCCAUCC |
| AH0788 | No. 780 | UGGCCCGGAAGAAAUAGAAUG | No. 1960 | UUCUAUUUCUUCCGGGCCAUC |
| AH0781 | No. 781 | GGCCCGGAAGAAAUAGAAUGU | No. 1961 | AUUCUAUUUCUUCCGGGCCAU |
| AH0782 | No. 782 | GCCCGGAAGAAAUAGAAUGUA | No. 1962 | CAUUCUAUUUCUUCCGGGCCA |
| AH0783 | No. 783 | CCCGGAAGAAAUAGAAUGUAC | No. 1963 | ACAUUCUAUUUCUUCCGGGCC |
| AH0785 | No. 785 | GGGAAGAAAUAGAAUGUACCA | No. 1965 | GUACAUUCUAUUUCUUCCGGG |
| AH0786 | No. 786 | GGAAGAAAUAGAAUGUACCAA | No. 1966 | GGUACAUUCUAUUUCUUCCGG |
| AH0787 | No. 787 | GAAGAAAUAGAAUGUACCAAA | No. 1967 | UGGUACAUUCUAUUUCUUCCG |
| AH0790 | No. 790 | GAAAUAGAAUGUACCAAACUG | No. 1970 | GUUUGGUACAUUCUAUUUCUU |
| AH0795 | No. 795 | AGAAUGUACCAAACUGGGAAA | No. 1975 | UCCCAGUUUGGUACAUUCUAU |
| AH0796 | No. 796 | GAAUGUACCAAACUGGGAAAC | No. 1976 | UUCCCAGUUUGGUACAUUCUA |
| AH0797 | No. 797 | AAUGUACCAAACUGGGAAACU | No. 1977 | UUUCCCAGUUUGGUACAUUCU |
| AH0800 | No. 800 | GUACCAAACUGGGAAACUGGU | No. 1980 | CAGUUUCCCAGUUUGGUACAU |
| AH0804 | No. 804 | CAAACUGGGAAACUGGUCUGC | No. 1984 | AGACCAGUUUCCCAGUUUGGU |
| AH0805 | No. 805 | AAACUGGGAAACUGGUCUGCC | No. 1985 | CAGACCAGUUUCCCAGUUUGG |
| AH0808 | No. 808 | CUGGGAAACUGGUCUGCCAUG | No. 1988 | UGGCAGACCAGUUUCCCAGUU |
| AH0809 | No. 809 | UGGGAAACUGGUCUGCCAUGC | No. 1989 | AUGGCAGACCAGUUUCCCAGU |
| AH0810 | No. 810 | GGGAAACUGGUCUGCCAUGCC | No. 1990 | CAUGGCAGACCAGUUUCCCAG |
| AH0811 | No. 811 | GGAAACUGGUCUGCCAUGCCA | No. 1991 | GCAUGGCAGACCAGUUUCCCA |
| AH0813 | No. 813 | AAACUGGUCUGCCAUGCCAAG | No. 1993 | UGGCAUGGCAGACCAGUUUCC |
| AH0814 | No. 814 | AACUGGUCUGCCAUGCCAAGU | No. 1994 | UUGGCAUGGCAGACCAGUUUC |
| AH0815 | No. 815 | ACUGGUCUGCCAUGCCAAGUU | No. 1995 | CUUGGCAUGGCAGACCAGUUU |
| AH0816 | No. 816 | CUGGUCUGCCAUGCCAAGUUG | No. 1996 | ACUUGGCAUGGCAGACCAGUU |
| AH0817 | No. 817 | UGGUCUGCCAUGCCAAGUUGU | No. 1997 | AACUUGGCAUGGCAGACCAGU |
| AH0818 | No. 818 | GGUCUGCCAUGCCAAGUUGUA | No. 1998 | CAACUUGGCAUGGCAGACCAG |
| AH0819 | No. 819 | GUGUGCCAUGCCAAGUUGUAA | No. 1999 | ACAACUUGGCAUGGCAGACCA |
| AH0820 | No. 820 | UCUGCCAUGCCAAGUUGUAAA | No. 2000 | UACAACUUGGCAUGGCAGACC |
| AH0821 | No. 821 | CUGCCAUGCCAAGUUGUAAAG | No. 2001 | UUACAACUUGGCAUGGCAGAC |
| AH0822 | No. 822 | UGCCAUGCCAAGUUGUAAAGC | No. 2002 | UUUACAACUUGGCAUGGCAGA |
| AH0823 | No. 823 | GCCAUGCCAAGUUGUAAAGCA | No. 2003 | CUUUACAACUUGGCAUGGCAG |
| | Double | | | Relative |
| | stranded | | | expressed |
| | nucleic | | Target β2GPI | amount |
| | acid No. | SEQ ID NO. | mRNA sequence | of β2GPI |
| | AH0750 | No. 3110 | ATTTGGCTGCCATGATGGA | 0.128 |
| | AH0753 | No. 3113 | TGGCTGCCATGATGGATAT | 0.117 |
| | AH0754 | No. 3114 | GGCTGCCATGATGGATATT | 0.162 |
| | AH0756 | No. 3116 | CTGCCATGATGGATATTCT | 0.095 |
| | AH0757 | No. 3117 | TGCCATGATGGATATTCTC | 0.226 |
| | AH0759 | No. 3119 | CCATGATGGATATTCTCTG | 0.283 |
| | AH0760 | No. 3120 | CATGATGGATATTCTCTGG | 0.337 |
| | AH0762 | No. 3122 | TGATGGATATTCTCTGGAT | 0.195 |
| | AH0763 | No. 3123 | GATGGATATTCTCTGGATG | 0.141 |
| | AH0766 | No. 3126 | GGATATTCTCTGGATGGCC | 0.199 |
| | AH0771 | No. 3131 | TTCTCTGGATGGCCCGGAA | 0.267 |
| | AH0773 | No. 3133 | CTCTGGATGGCCCGGAAGA | 0.167 |
| | AH0774 | No. 3134 | TCTGGATGGCCCGGAAGAA | O.207 |
| | AH0775 | No. 3135 | CTGGATGGCCCGGAAGAAA | 0.310 |
| | AH0776 | No. 3136 | TGGATGGCCCGGAAGAAAT | 0.134 |
| | AH0777 | No. 3137 | GGATGGCCCGGAAGAAATA | 0.010 |
| | AH0779 | No. 3139 | ATGGCCCGGAAGAAATAGA | 0.201 |
| | AH0788 | No. 3140 | TGGCCCGGAAGAAATAGAA | 0.160 |
| | AH0781 | No. 3141 | GGCCCGGAAGAAATAGAAT | 0.205 |
| | AH0782 | No. 3142 | GCCCGGAAGAAATAGAATG | 0.066 |
| | AH0783 | No. 3143 | CCCGGAAGAAATAGAATCT | 0.153 |
| | AH0785 | No. 3145 | CGGAAGAAATAGAATGTAC | 0.126 |
| | AH0786 | No. 3146 | GGAAGAAATAGAATGTACC | 0.295 |
| | AH0787 | No. 3147 | GAAGAAATAGAATGTACCA | 0.244 |
| | AH0790 | No. 3150 | GAAATAGAATGTACCAAAC | 0.196 |
| | AH0795 | No. 3155 | AGAATGTACCAAACTGGGA | 0.172 |
| | AH0796 | No. 3156 | GAATGTACCAAACTGGGAA | 0.082 |
| | AH0797 | No. 3157 | AATGTACCAAACTGGGAAA | 0.310 |
| | AH0800 | No. 3160 | GTACCAAACTGGGAAACTG | 0.113 |
| | AH0804 | No. 3164 | CAAACTGGGAAACTGGTCT | 0.115 |
| | AH0805 | No. 3165 | AAACTGGGAAACTGGTCTG | 0.174 |
| | AH0808 | No. 3168 | CTGGGAAACTGGTCTGCCA | 0.025 |
| | AH0809 | No. 3169 | TGGGAAACTGGTCTGCCAT | 0.143 |
| | AH0810 | No. 3170 | GGGAAACTGGTCTGCCATG | 0.331 |
| | AH0811 | No. 3171 | GGAAACTGGTCTGCCATGC | 0.326 |
| | AH0813 | No. 3173 | AAACTGCTCTGCCATGCCA | 0.125 |
| | AH0814 | No. 3174 | AACTGGTCTGCCATGCCAA | 0.127 |
| | AH0815 | No. 3175 | ACTGGTCTGCCATGCCAAG | 0.280 |
| | AH0816 | No. 3176 | CTGGTCTGCCATGCCAAGT | 0.323 |
| | AH0817 | No. 3177 | TGGTCTGCCATGCCAAGTT | 0.167 |
| | AH0818 | No. 3178 | GGTCTGCCATGCCAAGTTG | 0.156 |
| | AH0819 | No. 3179 | GTCTGCCATGCCAAGTTGT | 0.118 |
| | AH0820 | No. 3180 | TCTGCCATGCCAAGTTGTA | 0.072 |
| | AH0821 | No. 3181 | CTGCCATGCCAAGTTGTAA | 0.066 |
| | AH0822 | No. 3182 | TGCCATGCCAAGTTGTAAA | 0.090 |
| | AH0823 | No. 3183 | GCCATGCCAAGTTGTAAAG | 0.128 |

TABLE 4-11

| Double | | | | |
|---|---|---|---|---|
| stranded | | | | |
| nucleic | | Sense strand sequence | | Antisense strand sequence |
| acid No. | SEQ ID NO. | (5′→3′) | SEQ ID NO. | (5′→3′) |
| AH0825 | No. 825 | CAUGCCAAGUUGUAAAGCAUC | No. 2005 | UGCUUUACAACUUGGCAUGGC |
| AH0826 | No. 826 | AUGCCAAGUUGUAAAGCAUCU | No. 2006 | AUGCUUUACAACUUGGCAUGG |
| AH0827 | No. 827 | UGCCAAGUUGUAAAGCAUCUU | No. 2007 | GAUGCUUUACAACUUGGCAUG |
| AH0828 | No. 828 | GCCAAGUUGUAAAGCAUCUUG | No. 2008 | AGAUGCUUUACAACUUGGCAU |
| AH0829 | No. 829 | CCAAGUUGUAAAGCAUCUUGU | No. 2009 | AAGAUGCUUUACAACUUGGCA |
| AH0830 | No. 830 | CAAGUUGUAAAGCAUCUUGUA | No. 2010 | CAAGAUGCUUUACAACUUGGC |
| AH0831 | No. 831 | AAGUUGUAAAGCAUCUUGUAA | No. 2011 | ACAAGAUGCUUUACAACUUGG |
| AH0832 | No. 832 | AGUUGUAAAGCAUCUUGUAAA | No. 2012 | UACAAGAUGCUUUACAACUUG |
| AH0833 | No. 833 | GUUGUAAAGCAUCUUGUAAAG | No. 2013 | UUACAAGAUGCUUUACAACUU |
| AH0834 | No. 834 | UUGUAAAGCAUCUUGUAAAGU | No. 2014 | UUUACAAGAUGCUUUACAACU |
| AH0835 | No. 835 | UGUAAAGCAUCUUGUAAAGUA | No. 2015 | CUUUACAAGAUGCUUUACAAC |
| AH0837 | No. 337 | UAAAGCAUCUUGUAAAGUACC | No. 2017 | UACUUUACAAGAUGCUUUACA |
| AH0838 | No. 838 | AAAGCAUCUUGUAAAGUACCU | No. 2018 | GUACUUUACAAGAUGCUUUAC |
| AH0840 | No. 840 | AGCAUCUUGUAAAGUACCUGU | No. 2020 | AGGUACUUUACAAGAUGCUUU |
| AH0842 | No. 842 | CAUCUUGUAAAGUACCUGUGA | No. 2022 | ACAGGUACUUUACAAGAUGCU |
| AH0845 | No. 845 | CUUGUAAAGUACCUGUGAAAA | No. 2025 | UUCACAGGUACUUUACAAGAU |
| AH0846 | No. 846 | UUGUAAAGUACCUGUGAAAAA | No. 2026 | UUUCACAGGUACUUUACAAGA |
| AH0841 | No. 847 | UGUAAAGUACCUGUGAAAAAA | No. 2027 | UUUUCACAGGUACUUUACAAG |
| AH0852 | No. 852 | AGUACCUGUGAAAAAAGCCAC | No. 2032 | GGCUUUUUUCACAGGUACUUU |
| AH0853 | No. 853 | GUACCUGUGAAAAAAGCCACU | No. 2033 | UGGCUUUUUUCACAGGUACUU |
| AH0854 | No. 854 | UACCUGUGAAAAAAGCCACUG | No. 2034 | GUGGCUUUUUUCACAGGUACU |
| AH0855 | No. 855 | ACCUGUGAAAAAAGCCACUGU | No. 2035 | AGUGGCUUUUUUCACAGGUAC |
| AH0857 | No. 857 | CUGUGAAAAAAGCCACUGUGG | No. 2037 | ACAGUGGCUUUUUUCACAGGU |
| AH0858 | No. 858 | UGUGAAAAAAGCCACUGUGGU | No. 2038 | CACAGUGGCUUUUUUCACAGG |
| AH0859 | No. 859 | GUGAAAAAAGCCACUGUGGUG | No. 2039 | CCACAGUGGCUUUUUUCACAG |
| AH0860 | No. 860 | UGAAAAAAGCCACUGUGGUGU | No. 2040 | ACCACAGUGGCUUUUUUCACA |
| AH0861 | No. 861 | GAAAAAAGCCACUGUGGUGUA | No. 2041 | CACCACAGUGGCUUUUUUCAC |
| AH0863 | No. 863 | AAAAAGCCACUGUGGUGUACC | No. 2043 | UACACCACAGUGGCUUUUUUC |
| AH0864 | No. 854 | AAAAGCCACUGUGGUGUACCA | No. 2044 | GUACACCACAGUGGCUUUUUU |
| AH0866 | No. 866 | AAGGCACUGUGGUGUACCAAG | No. 2046 | UGGUACACCACAGUGGCUUUU |
| AH0861 | No. 867 | AGCCACUGUGGUGUACCAAGG | No. 2047 | UUGGUACACCACAGUGGCUUU |
| AH0868 | No. 868 | GCCACUGUGGUGUACCAAGGA | No. 2048 | CUUGGUACACCACAGUGGCUU |
| AH0870 | No. 870 | CACUGUGGUGUACCAAGGAGA | No. 2050 | UCCUUGGUACACCACAGUGGC |
| AH0872 | No. 872 | CUGUGGUGUACCAAGGAGAGA | No. 2052 | UCUCCUUGGUACACCACAGUG |
| AH0873 | No. 873 | UGUGGUGUACCAAGGAGAGAG | No. 2053 | CUCUCCUUGGUACACCACAGU |
| AH0874 | No. 874 | GUGGUGUACCAAGGAGAGAGA | No. 2054 | UCUCUCCUUGGUACACCACAG |
| AH8875 | No. 875 | UGGUGUACCAAGGAGAGAGAG | No. 2055 | CUCUCUCCUUGGUACACCACA |
| AH0876 | No. 876 | GGUGUACCAAGGAGAGAGAGU | No. 2056 | UCUCUCUCCUUGGUACACCAC |
| AH0877 | No. 877 | GUGUACCAAGGAGAGAGAGUA | No. 2057 | CUCUCUCUCCUUGGUACACCA |
| AH0879 | No. 879 | GUACCAAGGAGAGAGAGUAAA | No. 2059 | UACUCUCUCUCCUUGGUACAC |
| AH0880 | No. 880 | UACCAAGGAGAGAGAGUAAAG | No. 2060 | UUACUCUCUCUCCUUGGUACA |
| AH0881 | No. 881 | ACCAAGGAGAGAGAGUAAAGA | No. 2061 | UUUACUCUCUCUCCUUGGUAC |
| AH0882 | No. 882 | CCAAGGAGAGAGAGUAAAGAU | No. 2062 | CUUUACUCUCUCUCCUUGGUA |
| AH0883 | No. 883 | CAAGGAGAGAGAGUAAAGAUU | No. 2063 | UCUUUACUCUCUCUCCUUGGU |
| AH0884 | No. 884 | AAGGAGAGAGAGUAAAGAUUC | No. 2064 | AUCUUUACUCUCUCUCCUUGG |
| AH0885 | No. 885 | AGGAGAGAGAGUAAAGAUUCA | No. 2065 | AAUCUUUACUCUCUCUCCUUG |
| | Double | | | Relative |
| | stranded | | | expressed |
| | nucleic | | Target β2GPI | amount |
| | acid No. | SEQ ID NO. | mRNA sequence | of β2GPI |
| | AH0825 | No. 3185 | CATGCCAAGTTGTAAAGCA | 0.086 |
| | AH0826 | No. 3186 | ATGCCAAGTTGTAAAGGCT | 0.082 |
| | AH0827 | No. 3187 | TGCCAAGTTGTAAAGCATC | 0.342 |
| | AH0828 | No. 3188 | GCCAAGTTGTAAAGCATCT | 0_160 |
| | AH0829 | No. 3189 | CCAAGTTGTAAAGCATCTT | 0.159 |
| | AH0830 | No. 3190 | CAAGTTGTAAAGCATCTTG | 0.134 |
| | AH0831 | No. 3191 | AAGTTGTAAAGCATCTTGT | 0.110 |
| | AH0832 | No. 3192 | AGTTGTAAAGCATCTTGTA | 0.064 |
| | AH0833 | No. 3193 | GTTGTAAAGCATCTTGTAA | 0.175 |
| | AH0834 | No. 3194 | TTGTAAAGCATCTTGTAAA | 0.092 |
| | AH0835 | No. 3195 | TGTAAAGCATCTTGTAAAG | 0.129 |
| | AH0837 | No. 3197 | TAAAGCATCTTGTAAAGTA | 0.087 |
| | AH0838 | No. 3198 | AAAGCATCTTGTAAAGTAC | 0.174 |
| | AH0840 | No. 3200 | AGCATCTTGTAAAGTACCT | 0.326 |
| | AH0842 | No. 3202 | CATCTTGTAAAGTACCTGT | 0.260 |
| | AH0845 | No. 3205 | CTTGTAAAGTACCTGTGAA | 0.181 |
| | AH0846 | No. 3206 | TTGTAAAGTACCTGTGAAA | 0.166 |
| | AH0841 | No. 3207 | TGTAAAGTACCTGTGAAAA | 0.210 |
| | AH0852 | No. 3212 | AGTACCTGTGAAAAAAGCC | 0.247 |
| | AH0853 | No. 3213 | GTACCTGTGAAAAAAGCCA | 0.334 |
| | AH0854 | No. 3214 | TACCTGTGAAAAAAGCCAC | 0.302 |
| | AH0855 | No. 3215 | ACCTGTGAAAAAAGCCACT | 0.312 |
| | AH0857 | No. 3217 | CTGTGAAAAAAGCCACTGT | 0.196 |
| | AH0858 | No. 3218 | TGTGAAAAAAGCCACTGTG | 0.091 |
| | AH0859 | No. 3219 | GTGAAAAAAGCCACTGTGG | 0.287 |
| | AH0860 | No. 3220 | TGAAAAAAGCCACTGTGGT | 0.278 |
| | AH0861 | No. 3221 | GAAAAAAGCCACTGTGGTG | 0.170 |
| | AH0863 | No. 3223 | AAAAAGCCACTGTGGTGTA | 0.269 |
| | AH0864 | No. 3224 | AAAAGCCACTGTGGTGTAC | 0.185 |
| | AH0866 | No. 3226 | AAGCCACTGTGGTGTACCA | 0.209 |
| | AH0861 | No. 3227 | AGCCACTGTGGTGTACCAA | 0.235 |
| | AH0868 | No. 3228 | GCCACTGTGGTGTACCAAG | 0.106 |
| | AH0870 | No. 3230 | CACTGTGGTGTACCAAGGA | 0.154 |
| | AH0872 | No. 3232 | CTGTGGTGTACCAAGGAGA | 0.230 |
| | AH0873 | No. 3233 | TGTGGTGTACCAAGGAGAG | 0.289 |
| | AH0874 | No. 3234 | GTGGTGTACCAAGGAGAGA | 0.174 |
| | AH8875 | No. 3235 | TGGTGTACCAAGGAGAGAG | 0.281 |
| | AH0876 | No. 3236 | GGTGTACCAAGGAGAGAGA | 0.117 |
| | AH0877 | No. 3237 | GTGTACCAAGGAGAGAGAG | 0.149 |
| | AH0879 | No. 3239 | GTACCAAGGAGAGAGAGTA | 0.325 |
| | AH0880 | No. 3240 | TACCAAGGAGAGAGAGTAA | 0.198 |
| | AH0881 | No. 3241 | ACCAAGGAGAGAGAGTAAA | 0.159 |
| | AH0882 | No. 3242 | CCAAGGAGAGAGAGTAAAG | 0.244 |
| | AH0883 | No. 3243 | CAAGGAGAGAGAGTAAAGA | 0.046 |
| | AH0884 | No. 3244 | AAGGAGAGAGAGTAAAGAT | 0.118 |
| | AH0885 | No. 3245 | AGGAGAGAGAGTAAAGATT | 0.150 |

TABLE 4-12

| Double | | | | |
|---|---|---|---|---|
| stranded | | | | |
| nucleic | | Sense strand sequence | | Antisense strand sequence |
| acid No. | SEQ ID NO. | (5′→3′) | SEQ ID NO. | (5′→3′) |
| AH0886 | No. 886 | GGAGAGAGAGUAAAGAUUCAG | No. 2066 | GAAUCUUUACUCUCUCUCCUU |
| AH0887 | No. 887 | GAGAGAGAGUAAAGAUUCAGG | No. 2067 | UGAAUCUUUACUCUCUCUCCU |
| AH0888 | No. 888 | AGAGAGAGUAAAGAUUCAGGA | No. 2068 | CUGAAUCUUUACUCUCUCUCC |
| AH0890 | No. 890 | AGAGAGUAAAGAUUCAGGAAA | No. 2070 | UCCUGAAUCUUUACUCUCUCU |
| AH0891 | No. 891 | GAGAGUAAAGAUUCAGGAAAA | No. 2071 | UUCCUGAAUCUUUACUCUCUC |
| AH0892 | No. 892 | AGAGUAAAGAUUCAGGAAAAA | No. 2072 | UUUCCUGAAUCUUUACUCUCU |
| AH0893 | No. 893 | GAGUAAAGAUUCAGGAAAAAU | No. 2073 | UUUUCCUGAAUCUUUACUCUC |
| A80894 | No. 894 | AGUAAAGAUUCAGGAAAAAUU | No. 2074 | UUUUUCCUGAAUCUUUACUCU |
| AH0895 | No. 895 | GUAAAGAUUCAGGAAAAAUUU | No. 2075 | AUUUUUCCUGAAUCUUUACUC |
| AH0896 | No. 896 | UAAAGAUUCAGGAAAAAUUUA | No. 2076 | AAUUUUUCCUGAAUCUUUACU |
| AH9892 | No. 897 | AAAGAUUCAGGAAAAAUUUAA | No. 2077 | AAAUUUUUCCUGAAUCUUUAC |
| AH0898 | No. 898 | AAGAUUCAGGAAAAAUUUAAG | No. 2078 | UAAAUUUUUCCUGAAUCUUUA |
| AH0899 | No. 899 | AGAUUCAGGAAAAAUUUAAGA | No. 2079 | UUAAAUUUUUCCUGAAUCUUU |
| AH0905 | No. 905 | AGGAAAAAUUUAAGAAUGGAA | No. 2085 | CCAUUCUUAAAUUUUUCCUGA |
| AH0906 | No. 906 | GGAAAAAUUUAAGAAUGGAAU | No. 2086 | UCCAUUCUUAAAUUUUUCCUG |
| AH0907 | No. 907 | GAAAAAUUUAAGAAUGGAAUG | No. 2087 | UUCCAUUCUUAAAUUUUUCCU |
| AH0912 | No. 912 | AUUUAAGAAUGGAAUGCUACA | No. 2092 | UAGCAUUCCAUUCUUAAAUUU |
| AH0914 | No. 914 | UUAAGAAUGGAAUGCUACAUG | No. 2094 | UGUAGCAUUCCAUUCUUAAAU |
| AH0917 | No. 917 | AGAAUGGAAUGCUACAUGGUG | No. 2097 | CCAUGUAGCAUUCCAUUCUUA |
| AH0918 | No. 918 | GAAUGGAAUGCUACAUGGUGA | No. 2098 | ACCAUGUAGCAUUCCAUUCUU |
| AH0919 | No. 919 | AAUGGAAUGCUACAUGGUGAU | No. 2099 | CACCAUGUAGCAUUCCAUUCU |
| AH0920 | No. 920 | AUGGAAUGCUACAUGGUGAUA | No. 2100 | UCACCAUGUAGCAUUCCAUUC |
| AH0921 | No. 921 | UGGAAUGCUACAUGGUGAUAA | No. 2101 | AUCACCAUGUAGCAUUCCAUU |
| AH0922 | No. 922 | GGAAUGCUACAUGGUGAUAAA | No. 2102 | UAUCACCAUGUAGCAUUCCAU |
| AH0923 | No. 923 | GAAUGCUACAUGGUGAUAAAG | No. 2103 | UUAUCACCAUGUAGCAUUCCA |
| AH0924 | No. 924 | AAUGCUACAUGGUGAUAAAGU | No. 2104 | UUUAUCACCAUGUAGCAUUCC |
| AH0926 | No. 926 | UGCUACAUGGUGAUAAAGUUU | No. 2106 | ACUUUAUCACCAUGUAGCAUU |
| AH0927 | No. 927 | GCUACAUGGUGAUAAAGUUUC | No. 2107 | AACUUUAUCACCAUGUAGCAU |
| AH0928 | No. 928 | CUACAUGGUGAUAAAGUUUCU | No. 2108 | AAACUUUAUCACCAUGUAGCA |
| AH0930 | No. 930 | ACAUGGUGAUAAAGUUUCUUU | No. 2110 | AGAAACUUUAUCACCAUGUAG |
| AH0932 | No. 932 | AUGGUGAUAAAGUUUCUUUCU | No. 2112 | AAAGAAACUUUAUCACCAUGU |
| AH0934 | No. 934 | GGUGAUAAAGUUUCUUUCUUC | No. 2114 | AGAAAGAAACUUUAUCACCAU |
| AH0935 | No. 935 | GUGAUAAAGUUUCUUUCUUCU | No. 2115 | AAGAAAGAAACUUUAUCACCA |
| AH0936 | No. 936 | UGAUAAAGUUUCUUUCUUCUG | No. 2116 | GAAGAAAGAAACUUUAUCACC |
| AH0937 | No. 937 | GAUAAAGUUUCUUUCUUCUGC | No. 2117 | AGAAGAAAGAAACUUUAUCAC |
| AH0940 | No. 940 | AAAGUUUCUUUCUUCUGCAAA | No. 2120 | UGCAGAAGAAAGAAACUUUAU |
| AH0941 | No. 941 | AAGUUUCUUUCUUCUGCAAAA | No. 2121 | UUGCAGAAGAAAGAAACUUUA |
| AH0942 | No. 942 | AGUUUCUUUCUUCUGCAAAAA | No. 2122 | UUUGCAGAAGAAAGAAACUUU |
| AH0943 | No. 943 | GUUUCUUUCUUCUGCAAAAAU | No. 2123 | UUUUGCAGAAGAAAGAAACUU |
| AH0944 | No. 944 | UUUCUUUCUUCUGCAAAAAUA | No. 2124 | UUUUUGCAGAAGAAAGAAACU |
| AH0945 | No. 945 | UUCUUUCUUCUGCAAAAAUAA | No. 2125 | AUUUUUGCAGAAGAAAGAAAC |
| AH0946 | No. 946 | UCUUUCUUCUGCAAAAAUAAG | No. 2126 | UAUUUUUGCAGAAGAAAGAAA |
| AH0947 | No. 947 | CUUUCUUCUGCAAAAAUAAGG | No. 2127 | UUAUUUUUGCAGAAGAAAGAA |
| AH0948 | No. 948 | UUUCUUCUGCAAAAAUAAGGA | No. 2128 | CUUAUUUUUGCAGAAGAAAGA |
| AH0953 | No. 953 | UCUGCAAAAAUAAGGAAAAGA | No. 2133 | UUUUCCUUAUUUUUGCAGAAG |
| AH0955 | No. 955 | UGCAAAAAUAAGGAAAAGAAG | No. 2135 | UCUUUUCCUUAUUUUUGCAGA |
| | Double | | | Relative |
| | stranded | | | expressed |
| | nucleic | | Target β2GPI | amount |
| | acid No. | SEQ ID NO. | mRNA sequence | of β2GPI |
| | AH0886 | No. 3246 | GGAGAGAGAGTAAAGATTC | 0.187 |
| | AH0887 | No. 3247 | GAGAGAGAGTAAAGATTCA | 0.061 |
| | AH0888 | No. 3248 | AGAGAGAGTAAAGATTCAG | 0.230 |
| | AH0890 | No. 3250 | AGAGAGTAAAGATTCAGGA | 0.270 |
| | AH0891 | No. 3251 | GAGAGTAAAGATTCAGGAA | 0.100 |
| | AH0892 | No. 3252 | AGAGTAAAGATTCAGGAAA | 0.212 |
| | AH0893 | No. 3253 | GAGTAAAGATTCAGGAAAA | 0.114 |
| | A80894 | No. 3254 | AGTAAAGATTCAGGAAAAA | 0.185 |
| | AH0895 | No. 3255 | GTAAAGATTCAGGAAAAAT | 0.203 |
| | AH0896 | No. 3256 | TAAAGATTCAGGA&AAATT | 0.149 |
| | AH9892 | No. 3257 | AAAGATTCAGGAAAAATTT | 0.218 |
| | AH0898 | No. 3258 | AAGATTCAGGAAAAATTTA | 0.262 |
| | AH0899 | No. 3259 | AGATTCAGGAAAAATTTAA | 0.334 |
| | AH0905 | No. 3265 | AGGAAAAATTTAAGAATGG | 0.172 |
| | AH0906 | No. 3266 | GGAAAAATTTAAGAATGGA | 0.171 |
| | AH0907 | No. 3267 | GAAAAATTTAAGAATGGAA | 0.260 |
| | AH0912 | No. 3272 | ATTTAAGAATGGAATGCTA | 0.323 |
| | AH0914 | No. 3274 | TTAAGAATGGAATGCTACA | 0.342 |
| | AH0917 | No. 3277 | AGAATGGAATGCTACATGG | 0.221 |
| | AH0918 | No. 3278 | GAATGGAATGCTACATGGT | 0.162 |
| | AH0919 | No. 3279 | AATGGAATGCTACATGGTG | 0.287 |
| | AH0920 | No. 3280 | ATGGAATGGTACATGGTGA | 0.212 |
| | AH0921 | No. 3281 | TGGAATGCTACATGGTGAT | 0.127 |
| | AH0922 | No. 3282 | GGAATGCTACATGGTGATA | 0.241 |
| | AH0923 | No. 3283 | GAATGCTACATGGTGATAA | 0.343 |
| | AH0924 | No. 3284 | AATGCTACATGGTGATAAA | 0.269 |
| | AH0926 | No. 3286 | TGCTACATGGTGATAAAGT | 0.259 |
| | AH0927 | No. 3287 | GCTACATGGTGATAAAGTT | 0.240 |
| | AH0928 | No. 3288 | CTACATGGTGATAAAGTTT | 0.080 |
| | AH0930 | No. 3290 | ACATGGTGATAAAGTTTCT | 0.119 |
| | AH0932 | No. 3292 | ATGGTGATAAAGTTTCTTT | 0.342 |
| | AH0934 | No. 3294 | GGTGATAAAGTTTCTTTCT | 0.145 |
| | AH0935 | No. 3295 | GTGATAAAGTTTCTTTCTT | 0.185 |
| | AH0936 | No. 3296 | TGATAAAGTTTCTTTCTTC | 0.132 |
| | AH0937 | No. 3297 | GATAAAGTTTCTTTCTTCT | 0.145 |
| | AH0940 | No. 3300 | AAAGTTTCTTTCTTCTGCA | 0.213 |
| | AH0941 | No. 3301 | AAGTTTCTTTCTTCTGCAA | 0.162 |
| | AH0942 | No. 3302 | AGTTTCTTTCTTCTGCAAA | 0.229 |
| | AH0943 | No. 3303 | GTTTCTTTCTTCTGCAAAA | 0.081 |
| | AH0944 | No. 3304 | TTTCTTTCTTCTGCAAAAA | 0.119 |
| | AH0945 | No. 3305 | TTCTTTCTTCTGCAAAAAT | 0.168 |
| | AH0946 | No. 3306 | TCTTTCTTCTGCAAAAATA | 0.106 |
| | AH0947 | No. 3307 | CTTTCTTCTGCAAAAATAA | 0.115 |
| | AH0948 | No. 3308 | TTTCTTCTGCAAAAATAAG | 0.299 |
| | AH0953 | No. 3313 | TCTGCAAAAATAAGGAAAA | 0.188 |
| | AH0955 | No. 3315 | TGCAAAAATAAGGAAAAGA | 0.305 |

TABLE 4-13

| Double | | | | |
|---|---|---|---|---|
| stranded | | | | |
| nucleic | | Sense strand sequence | | Antisense strand sequence |
| acid No. | SEQ ID NO. | (5′→3′) | SEQ ID NO. | (5′→3′) |
| AH0956 | No. 956 | GCAAAAAUAAGGAAAAGAAGU | No. 2136 | UUCUUUUCCUUAUUUUUGCAG |
| AH0957 | No. 957 | CAAAAAUAAGGAAAAGAAGUG | No. 2137 | CUUCUUUUCCUUAUUUUUGCA |
| AH0964 | No. 964 | AAGGAAAAGAAGUGUAGCUAU | No. 2144 | AGCUACACUUCUUUUCCUUAU |
| AH0965 | No. 965 | AGGAAAAGAAGUGUAGCUAUA | No. 2145 | UAGCUACACUUCUUUUCCUUA |
| AH0966 | No. 966 | GGAAAAGAAGUGUAGCUAUAC | No. 2146 | AUAGCUACACUUCUUUUCCUU |
| AH0967 | No. 967 | GAAAAGAAGUGUAGCUAUACA | No. 2147 | UAUAGCUACACUUCUUUUCCU |
| AH0969 | No. 969 | AAAGAAGUGUAGCUAUACAGA | No. 2149 | UGUAUAGCUACACUUCUUUUC |
| AH0972 | No. 972 | GAAGUGUAGCUAUACAGAGGA | No. 2152 | CUCUGUAUAGCUACACUUCUU |
| AH0974 | No. 974 | AGUGUAGCUAUACAGAGGAUG | No. 2154 | UCCUCUGUAUAGCUACACUUC |
| AH0975 | No. 975 | GUGUAGCUAUACAGAGGAUGC | No. 2155 | AUCCUCUGUAUAGCUACACUU |
| AH0977 | No. 977 | GUAGCUAUACAGAGGAUGCUC | No. 2157 | GCAUCCUCUGUAUAGCUACAC |
| AH0978 | No. 978 | UAGCUAUACAGAGGAUGCUCA | No. 2158 | AGCAUCCUCUGUAUAGCUACA |
| AH0980 | No. 980 | GCUAUACAGAGGAUGCUCAGU | No. 2160 | UGAGCAUCCUCUGUAUAGCUA |
| AH0981 | No. 981 | CUAUACAGAGGAUGCUCAGUG | No. 2161 | CUGAGCAUCCUCUGUAUAGCU |
| AH0985 | No. 985 | ACAGAGGAUGCUCAGUGUAUA | No. 2165 | UACACUGAGCAUCCUCUGUAU |
| AH0987 | No. 987 | AGAGGAUGCUCAGUGUAUAGA | No. 2167 | UAUACACUGAGCAUCCUCUGU |
| AH0988 | No. 988 | GAGGAUGCUCAGUGUAUAGAU | No. 2168 | CUAUACACUGAGCAUCCUCUG |
| AH0989 | No. 989 | AGGAUGCUCAGUGUAUAGAUG | No. 2169 | UCUAUACACUGAGCAUCCUCU |
| AH0990 | No. 990 | GGAUGCUCAGUGUAUAGAUGG | No. 2170 | AUCUAUACACUGAGCAUCCUC |
| AH0991 | No. 991 | GAUGCUCAGUGUAUAGAUGGC | No. 2171 | CAUCUAUACACUGAGCAUCCU |
| AH0996 | No. 996 | UCAGUGUAUAGAUGGCACUAU | No. 2176 | AGUGCCAUCUAUACACUGAGC |
| AH0997 | No. 997 | CAGUGUAUAGAUGGCACUAUC | No. 2177 | UAGUGCCAUCUAUACACUGAG |
| AH0996 | No. 998 | AGUGUAUAGAUGGCACUAUCG | No. 2178 | AUAGUGCCAUCUAUACACUGA |
| AH0999 | No. 999 | GUGUAUAGAUGGCACUAUCGA | No. 2179 | GAUAGUGCCAUCUAUACACUG |
| AH1000 | No. 1000 | UGUAUAGAUGGCACUAUCGAA | No. 2180 | CGAUAGUGCCAUCUAUACACU |
| AH1001 | No. 1001 | GUAUAGAUGGCACUAUCGAAG | No. 2181 | UCGAUAGUGCCAUCUAUACAC |
| AH1002 | No. 1002 | UAUAGAUGGCACUAUCGAAGU | No. 2182 | UUCGAUAGUGCCAUCUAUACA |
| AH1003 | No. 1003 | AUAGAUGGCACUAUCGAAGUC | No. 2183 | GUUCGAUAGUGCCAUCUAUAC |
| AH1005 | No. 1005 | AGAUGGCACUAUCGAAGUCCC | No. 2185 | GACUUCGAUAGUGCCAUCUAU |
| AH1007 | No. 1007 | AUGGCACUAUCGAAGUCCCCA | No. 2187 | GGGACUUCGAUAGUGCCAUCU |
| AH1009 | No. 1009 | GGCACUAUCGAAGUCCCCAAA | No. 2189 | UGGGGACUUCGAUAGUGGCAU |
| AH1010 | No. 1010 | GCACUAUCGAAGUCCCCAAAU | No. 2190 | UUGGGGACUUCGAUAGUGCCA |
| AH1011 | No. 1011 | CACUAUCGAAGUCCCCAAAUG | No. 2191 | UUUGGGGACUUCGAUAGUGGC |
| AH1013 | No. 1013 | CUAUCGAAGUCCCCAAAUGCU | No. 2193 | CAUUUGGGGACUUCGAUAGUG |
| AH1015 | No. 1015 | AUCGAAGUCCCCAAAUGCUUC | No. 2195 | AGCAUUUGGGGACUUCGAUAG |
| AH1016 | No. 1016 | UCGAAGUCCCCAAAUGCUUCA | No. 2196 | AAGCAUUUGGGGACUUCGAUA |
| AH1017 | No. 1017 | CGAAGUCCCCAAAUGCUUCAA | No. 2197 | GAAGCAUUUGGGGACUUCGAU |
| AH1018 | No. 1018 | GAAGUCCCCAAAUGCUUCAAG | No. 2198 | UGAAGCAUUUGGGGACUUGGA |
| AH1021 | No. 1021 | GUCCCCAAAUGCUUCAAGGAA | No. 2201 | CCUUGAAGCAUUUGGGGACUU |
| AH1022 | No. 1022 | UCCCCAAAUGCUUCAAGGAAC | No. 2202 | UCCUUGAAGCAUUUGGGGACU |
| AH1023 | No. 1023 | CCCCAAAUGCUUCAAGGAACA | No. 2203 | UUCCUUGAAGCAUUUGGGGAC |
| AH1024 | No. 1024 | CCCAAAUGCUUCAAGGAACAC | No. 2204 | GUUCCUUGAAGCAUUUGGGGA |
| AH1025 | No. 1025 | CCAAAUGCUUCAAGGAACACA | No. 2205 | UGUUCCUUGAAGCAUUUGGGG |
| AH1026 | No. 1026 | CAAAUGCUUCAAGGAACACAG | No. 2206 | GUGUUCCUUGAAGCAUUUGGG |
| AH1027 | No. 1027 | AAAUGCUUCAAGGAACACAGU | No. 2207 | UGUGUUCCUUGAAGCAUUUGG |
| AH1028 | No. 1028 | AAUGCUUCAAGGAACACAGUU | No. 2208 | CUGUGUUCCUUGAAGCAUUUG |
| | Double | | | Relative |
| | stranded | | | expressed |
| | nucleic | | Target β2GPI | amount |
| | acid No. | SEQ ID NO. | mRNA sequence | of β2GPI |
| | AH0956 | No. 3316 | GCAAAAATAAGGAAAAGAA | 0.185 |
| | AH0957 | No. 3317 | CAAAAATAAGGAAAATAAG | 0.335 |
| | AH0964 | No. 3324 | AAGGAAAAGAAGTGTAGCT | 0.329 |
| | AH0965 | No. 3325 | AGGAAAAGAAGTGTAGCTA | 0.153 |
| | AH0966 | No. 3326 | GGAAAAGAAGTGTAGCTAT | 0.106 |
| | AH0967 | No. 3327 | GAAAAGAAGTGTAGCTATA | 0.097 |
| | AH0969 | No. 3329 | AAAGAAGTGTAGCTATACA | 0.228 |
| | AH0972 | No. 3332 | GAAGTGTAGCTATACAGAG | 0.293 |
| | AH0974 | No. 3334 | AGTGTAGCTATACAGAGGA | 0.160 |
| | AH0975 | No. 3335 | GTGTAGCTATACAGAGGAT | 0.227 |
| | AH0977 | No. 3337 | GTAGCTATACAGAGGATGC | 0.285 |
| | AH0978 | No. 3338 | TAGCTATACAGAGGATGCT | 0.245 |
| | AH0980 | No. 3340 | GCTATACAGAGGATGCTCA | 0.090 |
| | AH0981 | No. 3341 | CTATACAGAGGATGCTCAG | 0.137 |
| | AH0985 | No. 3345 | ACAGAGGATGCTCAGTGTA | 0.308 |
| | AH0987 | No. 3347 | AGAGGATGCTCAGTGTATA | 0.082 |
| | AH0988 | No. 3348 | GAGGATGCTCAGTGTATAG | 0.292 |
| | AH0989 | No. 3349 | AGGATGCTCAGTGTATAGA | 0.338 |
| | AH0990 | No. 3350 | GGATGCTCAGTGTATAGAT | 0.252 |
| | AH0991 | No. 3351 | GATGCTCAGTGTATAGATG | 0.111 |
| | AH0996 | No. 3356 | TGAGTGTATAGATGGCACT | 0.233 |
| | AH0997 | No. 3357 | CAGTGTATAGATGGCACTA | 0.290 |
| | AH0996 | No. 3358 | AGTGTATAGATGGCACTAT | 0.199 |
| | AH0999 | No. 3359 | GTGTATAGATGGCACTATC | 0.101 |
| | AH1000 | No. 3360 | TGTATAGATGGCACTATCG | 0.310 |
| | AH1001 | No. 3361 | GTATAGATGGCACTATCGA | 0.082 |
| | AH1002 | No. 3362 | TATAGATGGCACTATCGAA | 0.084 |
| | AH1003 | No. 3363 | ATAGATGGCACTATCGAAG | 0.265 |
| | AH1005 | No. 3365 | AGATGGCACTATCGAAGTC | 0.100 |
| | AH1007 | No. 3367 | ATGGCACTATCGAAGTCCC | 0.232 |
| | AH1009 | No. 3369 | GGCACTATCGAAGTCCCCA | 0.122 |
| | AH1010 | No. 3370 | GCACTATCGAAGTCCCCAA | 0.089 |
| | AH1011 | No. 3371 | CACTATCGAAGTCCCCAAA | 0.154 |
| | AH1013 | No. 3373 | CTATCGAAGTCCCCAAATG | 0.139 |
| | AH1015 | No. 3375 | ATCGAAGTCCCCAAATGCT | 0.125 |
| | AH1016 | No. 3376 | TCGAAGTCCCCAAATGCTT | 0.112 |
| | AH1017 | No. 3377 | CGAAGTCCCCAAATGCTTC | 0.109 |
| | AH1018 | No. 3378 | GAAGTCCCCAAATGCTTCA | 0.170 |
| | AH1021 | No. 3381 | GTCCCCAAATGCTTCAAGG | 0.261 |
| | AH1022 | No. 3382 | TCCCCAAATGCTTCAAGGA | 0.074 |
| | AH1023 | No. 3383 | CCCCAAATGCTTGAAGGAA | 0.154 |
| | AH1024 | No. 3384 | CCCAAATGCTTCAAGGAAC | 0.108 |
| | AH1025 | No. 3385 | CCAAATGCTTCAAGGAACA | 0.056 |
| | AH1026 | No. 3386 | CAAATGCTTCAAGGAACAC | 0.325 |
| | AH1027 | No. 3387 | AAATGCTTCAAGGAACACA | 0.158 |
| | AH1028 | No. 3385 | AATGCTTCAAGGAACACAG | 0.257 |

TABLE 4-14

| Double | | | | |
|---|---|---|---|---|
| stranded | | | | |
| nucleic | | Sense strand sequence | | Antisense strand sequence |
| acid No. | SEQ ID NO. | (5′→3′) | SEQ ID NO. | (5′→3′) |
| AH1029 | No. 1029 | AUGCUUCAAGGAACACAGUUC | No. 2209 | ACUGUGUUCCUUGAAGCAUUU |
| AH1030 | No. 1030 | UGCUUCAAGGAACACAGUUCU | No. 2210 | AACUGUGUUCCUUGAAGCAUU |
| AH1031 | No. 1031 | GCUUCAAGGAACACAGUUCUC | No. 2211 | GAACUGUGUUCCOUGAAGCAU |
| AH1032 | No. 1032 | CUUCAAGGAACACAGUUCUCU | No. 2212 | AGAACUGUGUUCCUUGAAGCA |
| AH1034 | No. 1034 | UCAAGGAACACAGUUCUCUGG | No. 2214 | AGAGAACUGUGUUCCUUGAAG |
| AH1035 | No. 1035 | CAAGGAACACAGUUCUCUGGC | No. 2215 | CAGAGAACUGUGUUCCUUGAA |
| AH1038 | No. 1038 | GGAACACAGUUCUCUGGCUUU | No. 2218 | AGCCAGAGAACUGUGUUCCUU |
| AH1039 | No. 1039 | GAACACAGUUCUCUGGCUUUU | No. 2219 | AAGCCAGAGAACUGUGUUCCU |
| AH1040 | No. 1040 | AACACAGUUCUCUGGCUUUUU | No. 2220 | AAAGCCAGAGAACUGUGUUCC |
| AH1041 | No. 1041 | ACACAGUUCUCUGGCUUCUUG | No. 2221 | AAAAGCCAGAGAACUGUGUUC |
| AH1042 | No. 1042 | CACAGUUCUCUGGCUUUUUGG | No. 2222 | AAAAAGCCAGAGAACUGUGUU |
| AH1043 | No. 1043 | ACAGUUCUCUGGCUUUUUGGA | No. 2223 | CAAAAAGCCAGAGAACUGUGU |
| AH1044 | No. 1044 | CAGUUCUCUGGCUUUUUGGAA | No. 2224 | CCAAAAAGCCAGAGAACUGUG |
| AH1045 | No. 1045 | AGUUCUCUGGCUUUUUGGAAA | No. 2225 | UCCAAAAAGCCAGAGAACUGU |
| AH1046 | No. 1046 | GUUCUCUGGCUUUUUGGAAAA | No. 2226 | UUCCAAAAAGCCAGAGAACUG |
| AH1047 | No. 1047 | UUCUCUGGCUUUUUGGAAAAC | No. 2227 | UUUCCAAAAAGCCAGAGAACU |
| AH1048 | No. 1048 | UCUCUGGCUUUUUGGAAAACU | No. 2228 | UUUUCCAAAAAGCCAGAGAAC |
| AH1051 | No. 1051 | CUGGCUUUUUGGAAAACUGAU | No. 2231 | CAGUUUUCCAAAAAGCCAGAG |
| AH1052 | No. 1052 | UGGCUUUUUGGAAAACUGAUG | No. 2232 | UCAGUUUUCCAAAAAGCCAGA |
| AH1053 | No. 1053 | GGCUUUUUGGAAAACUGAUGC | No. 2233 | AUCAGUUUUCCAAAAAGCCAG |
| AH1054 | No. 1054 | GCUUUUUGGAAAACUGAUGCA | No. 2234 | CAUCAGUUUUCCAAAAAGCCA |
| AH1056 | No. 1056 | UUUUUGGAAAACUGAUGCAUC | No. 2236 | UGCAUGAGUUUUCCAAAAAGC |
| AH1057 | No. 1057 | UUUUGGAAAACUGAUGCAUCC | No. 2237 | AUGCAUCAGUUUUCCAAAAAG |
| AH1061 | No. 1061 | GGAAAACUGAUGCAUCCGAUG | No. 2241 | UCGGAUGCAUCAGUUUUCCAA |
| AH1062 | No. 1062 | GAAAACUGAUGCAUCCGAUGU | No. 2242 | AUCGGAUGCAUCAGUUUUCCA |
| AH1063 | No. 1063 | AAAACUGAUGCAUCCGAUGUA | No. 2243 | CAUCGGAUGCAUCAGUUUUCC |
| AH1064 | No. 1064 | AAACUGAUGCAUCCGAUGUAA | No. 2244 | ACAUCGGAUGCAUCAGUUUUC |
| AH1065 | No. 1065 | AACUGAUGCAUCCGAUGUAAA | No. 2245 | UACAUCGGAUGCAUCAGUUUU |
| AH1067 | No. 1067 | CUGAUGCAUCCGAUGUAAAGC | No. 2247 | UUUACAUCGGAUGCAUCAGUU |
| AH1068 | No. 1068 | UGAUGCAUCCGAUGUAAAGCC | No. 2248 | CUUUACAUCGGAUGCAUCAGU |
| AH1072 | No. 1072 | GCAUCCGAUGUAAAGCCAUGC | No. 2252 | AUGGCUUUACAUCGGAUGCAU |
| AH1073 | No. 1073 | CAUCCGAUGUAAAGCCAUGCU | No. 2253 | CAUGGCUUUACAUCGGAUGCA |
| AH1076 | No. 1076 | CCGAUGUAAAGCCAUGCUAAG | No. 2256 | UAGCAUGGCUUUACAUCGGAU |
| AH1077 | No. 1077 | CGAUGUAAAGCCAUGCUAAGG | No. 2257 | UUAGCAUGGCUUUACAUCGGA |
| AH1078 | No. 1078 | GAUGUAAAGCCAUGCUAAGGU | No. 2258 | CUUAGCAUGGCUUUACAUCGG |
| AH1083 | No. 1083 | AAAGCCAUGCUAAGGUGGUUU | No. 2263 | ACCACCUUAGCAUGGCUUUAC |
| AH1084 | No. 1084 | AAGCCAUGCUAAGGUGGUUUU | No. 2264 | AACCACCUUAGCAUGGCUUUA |
| AH1085 | No. 1085 | AGCCAUGCUAAGGUGGUUUUC | No. 2265 | AAACCACCUUAGCAUGGCUUU |
| AH1086 | No. 1086 | GCCAUGCUAAGGUGGUUUUCA | No. 2266 | AAAACCACCUUAGCAUGGCUU |
| AH1087 | No. 1087 | CCAUGCUAAGGUGGUUUUCAG | No. 2267 | GAAAACCACCUUAGCAUGGCU |
| AH1088 | No. 1088 | CAUGCUAAGGUGGUUUUCAGA | No. 2268 | UGAAAACCACCUUAGCAUGGC |
| AH1089 | No. 1089 | AUGCUAAGGUGGUUUUCAGAU | No. 2269 | CUGAAAACCACCUUAGCAUGG |
| AH1090 | No. 1090 | UGCUAAGGUGGUUUUCAGAUU | No. 2270 | UCUGAAAACCACCUUAGCAUG |
| AH1092 | No. 1092 | CUAAGGUGGUUUUCAGAUUCC | No. 2272 | AAUCUGAAAACCACCUUAGCA |
| AH1093 | No. 1093 | UAAGGUGGUUUUCAGAUUCCA | No. 2273 | GAAUCUGAAAACCACCUUAGC |
| AH1095 | No. 1095 | AGGUGGUUUUCAGAUUCCACA | No. 2275 | UGGAAUCUGAAAACCACCUUA |
| | Double | | | Relative |
| | stranded | | | expressed |
| | nucleic | | Target β2GPI | amount |
| | acid No. | SEQ ID NO. | mRNA sequence | of β2GPI |
| | AH1029 | No. 3389 | ATGCTTCAAGGAACACAGT | 0.175 |
| | AH1030 | No. 3390 | TGCTTCAAGGAACACAGTT | 0.200 |
| | AH1031 | No. 3391 | GCTTCAAGGAACACAGTTC | 0.074 |
| | AH1032 | No. 3392 | CTTCAAGGAACACAGTTCT | 0.083 |
| | AH1034 | No. 3394 | TCAAGGAACACAGTTCTCT | 0.279 |
| | AH1035 | No. 3395 | CAAGGAACACAGTTCTCTG | 0.238 |
| | AH1038 | No. 3398 | GGAACACAGTTCTCTGGCT | 0.067 |
| | AH1039 | No. 3399 | GAACACAGTTCTCTGGCTT | 0.072 |
| | AH1040 | No. 3400 | AACACAGTTCTCTGGCTTT | 0.094 |
| | AH1041 | No. 3401 | ACACAGTTCTCTGGCTTTT | 0.071 |
| | AH1042 | No. 3402 | CACAGTTCTCTGGCTTTTT | 0.143 |
| | AH1043 | No. 3403 | ACAGTTCTCTGGCTTTTTG | 0.082 |
| | AH1044 | No. 3404 | CAGTTCTCTGGCTTTTTGG | 0.199 |
| | AH1045 | No. 3405 | AGTTCTCTGGCTTTTTGGA | 0.108 |
| | AH1046 | No. 3406 | GTTCTCTGGCTTTTTGGAA | 0.156 |
| | AH1047 | No. 3407 | TTCTCTGGCTTTTTGGAAA | 0.111 |
| | AH1048 | No. 3408 | TCTCTGGCTTTTTGGAAAA | 0.313 |
| | AH1051 | No. 3411 | CTGGCTTTTTGGAAAACTG | 0.152 |
| | AH1052 | No. 3412 | TGGCTTTTTGGAAAACTGA | 0.097 |
| | AH1053 | No. 3413 | GGCTTTTTGGAAAACTGAT | 0.162 |
| | AH1054 | No. 3414 | GCTTTTTGGAAAACTGATG | 0.200 |
| | AH1056 | No. 3416 | TTTTTGGAAAACTGATGCA | 0.342 |
| | AH1057 | No. 3417 | TTTTGGAAAACTGATGCAT | 0.230 |
| | AH1061 | No. 3421 | GGAAAACTGATGCATCCGA | 0.128 |
| | AH1062 | No. 3422 | GAAAACTGATGCATCCGAT | 0.182 |
| | AH1063 | No. 3423 | AAAACTGATGCATCCGATG | 0.229 |
| | AH1064 | No. 3424 | AAACTGATGCATCCGATGT | 0.336 |
| | AH1065 | No. 3425 | AACTGATGCATCCGATGTA | 0.216 |
| | AH1067 | No. 3427 | CTGATGCATCCGATGTAAA | 0.241 |
| | AH1068 | No. 3428 | TGATGCATCCGATGTAAAG | 0.329 |
| | AH1072 | No. 3432 | GCATCCGATGTAAAGCCAT | 0.197 |
| | AH1073 | No. 3433 | CATCCGATGTAAAGCCATG | 0.120 |
| | AH1076 | No. 3436 | CCGATGTAAAGCCATGCTA | 0.219 |
| | AH1077 | No. 3437 | CGATGTAAAGCCATGCTAA | 0.061 |
| | AH1078 | No. 3438 | GATGTAAAGCCATGCTAAG | 0.131 |
| | AH1083 | No. 3443 | AAAGCCATGCTAAGGTGGT | 0.239 |
| | AH1084 | No. 3444 | AAGCCATGCTAAGGTGGTT | 0.139 |
| | AH1085 | No. 3445 | AGCCATGCTAAGGTGGTTT | 0.166 |
| | AH1086 | No. 3446 | GCCATGCTAAGGTGGTTTT | 0.100 |
| | AH1087 | No. 3447 | CCATGCTAAGGTGGTTTTC | 0.233 |
| | AH1088 | No. 3448 | CATGCTAAGGTGGTTTTCA | 0.072 |
| | AH1089 | No. 3449 | ATGCTAAGGTGGTTTTCAG | 0.175 |
| | AH1090 | No. 3450 | TGCTAAGGTGGTTTTCAGA | 0.130 |
| | AH1092 | No. 3452 | CTAAGGTGGTTTTCAGATT | 0.065 |
| | AH1093 | No. 3453 | TAAGGTGGTTTTCAGATTC | 0.141 |
| | AH1095 | No. 3455 | AGGTGGTTTTCAGATTCCA | 0.044 |

TABLE 4-15

| Double | | | | |
|---|---|---|---|---|
| stranded | | | | |
| nucleic | | Sense strand sequence | | Antisense strand sequence |
| acid No. | SEQ ID NO. | (5′→3′) | SEQ ID NO. | (5′→3′) |
| AH1096 | No. 1096 | GGUGGUUUUCAGAUUCCACAC | No. 2276 | GUGGAAUCUGAAAACCACCUU |
| AH1097 | No. 1097 | GUGGUUUUCAGAUUCCACACA | No. 2277 | UGUGGAAUCUGAAAACCACCU |
| AH1099 | No. 1099 | GGUUUUCAGAUUCCACACAAA | No. 2279 | UGUGUGGAAUCUGAAAACCAC |
| AH1100 | No. 1100 | GUUUUCAGAUUCCACACAAAA | No. 2280 | UUGUGUGGAAUCUGAAAACCA |
| AH1101 | No. 1101 | UUUUCAGAUUCCACACAAAAU | No. 2281 | UUUGUGUGGAAUCUGAAAACC |
| AH1102 | No. 1102 | UUUCAGAUUCCACACAAAAUG | No. 2282 | UUUUGUGUGGAAUCUGAAAAC |
| AH1103 | No. 1103 | UUCAGAUUCCACACAAAAUGU | No. 2283 | AUUUUGUGUGGAAUCUGAAAA |
| AH1104 | No. 1104 | UCAGAUUCCACACAAAAUGUC | No. 2284 | CAUUUUGUGUGGAAUCUGAAA |
| AH1105 | No. 1105 | CAGAUUCCACACAAAAUGUCA | No. 2285 | ACAUUUUGUGUGGAAUCUGAA |
| AHI106 | No. 1106 | AGAUUCCACACAAAAUGUCAC | No. 2286 | GACAUUUUGUGUGGAAUCUGA |
| AH1107 | No. 1107 | GAUUCCACACAAAAUGUCACA | No. 2287 | UGACAUUUUGUGUGGAAUCUG |
| AH1109 | No. 1109 | UUCCACACAAAAUGUCACACU | No. 2289 | UGUGACAUUUUGUGUGGAAUC |
| AH1111 | No. 1111 | CCACACAAAAUGUCACACUUG | No. 2291 | AGUGUGACAUUUUGUGUGGAA |
| AH1112 | No. 1112 | CACACAAAAUGUCACACUUGU | No. 2292 | AAGUGUGACAUUUUGUGUGGA |
| AH1113 | No. 1113 | ACACAAAAUGUCACACUUGUU | No. 2293 | CAAGUGUGACAUUUUGUGUGG |
| AH1114 | No. 1114 | CACAAAAUGUCACACUUGUUU | No. 2294 | ACAAGUGUGACAUUUUGUGUG |
| AH1115 | No. 1115 | ACAAAAUGUCACACUUGUUUC | No. 2295 | AACAAGUGUGACAUUUUGUGU |
| AH1116 | No. 1116 | CAAAAUGUCACACUUGUUUCU | No. 2296 | AAACAAGUGUGACAUUUUGUG |
| AH1118 | No. 1118 | AAAUGUCACACUUGUUUCUUG | No. 2298 | AGAAACAAGUGUGACAUUUUG |
| AH1120 | No. 1120 | AUGUCACACUUGUUUCUUGUU | No. 2300 | CAAGAAACAAGUGUGACAUUU |
| AH1121 | No. 1121 | UGUCACACUUGUUUCUUGUUC | No. 2301 | ACAAGAAACAAGUGUGACAUU |
| AH1122 | No. 1122 | GUCACACUUGUUUCUUGUUCA | No. 2302 | AACAAGAAACAAGUGUGACAU |
| AH1124 | No. 1124 | CACACUUGUUUCUUGUUCAUC | No. 2304 | UGAACAAGAAACAAGUGUGAC |
| AH1125 | No. 1125 | ACACUUGUUUCUUGUUCAUCC | No. 2305 | AUGAACAAGAAACAAGUGUGA |
| AH1127 | No. 1127 | ACUUGUUUCUUGUUCAUCCAA | No. 2307 | GGAUGAACAAGAAACAAGUGU |
| AH1126 | No. 1128 | CUUGUUUCUUGUUCAUCCAAG | No. 2308 | UGGAUGAACAAGAAACAAGUG |
| AH1129 | No. 1129 | UUGUUUCUUGUUCAUCCAAGG | No. 2309 | UUGGAUGAACAAGAAACAAGU |
| AH1130 | No. 1130 | UGUUUCUUGUUCAUCCAAGGA | No. 2310 | CUUGGAUGAACAAGAAACAAG |
| AH1131 | No. 1131 | GUUUCUUGUUCAUCCAAGGAA | No. 2311 | CCUUGGAUGAACAAGAAACAA |
| AH1133 | No. 1133 | UUCUUGUUCAUCCAAGGAACC | No. 2313 | UUCCUUGGAUGAACAAGAAAC |
| AH1134 | No. 1134 | UCUUGUUCAUCCAAGGAACCU | No. 2314 | GUUCCUUGGAUGAACAAGAAA |
| AH1135 | No. 1135 | CUUGUUCAUCCAAGGAACCUA | No. 2315 | GGUUCCUUGGAUGAACAAGAA |
| AH1136 | No. 1136 | UUGUUCAUCCAAGGAACCUAA | No. 2316 | AGGUUCCUUGGAUGAACAAGA |
| AH1137 | No. 1137 | UGUUCAUCCAAGGAACCUAAU | No. 2317 | UAGGUUCCUUGGAUGAACAAG |
| AH1138 | No. 1138 | GUUCAUCCAAGGAACCUAAUU | No. 2318 | UUAGGUUCCUUGGAUGAACAA |
| AH1139 | No. 1139 | UUCAUCCAAGGAACCUAAUUG | No. 2319 | AUUAGGUUCCUUGGAUGAACA |
| AH1140 | No. 1140 | UCAUCCAAGGAACCUAAUUGA | No. 2320 | AAUUAGGUUCCUUGGAUGAAC |
| AH1141 | No. 1141 | CAUCCAAGGAACCUAAUUGAA | No. 2321 | CAAUUAGGUUCCUUGGAUGAA |
| AH1142 | No. 1142 | AUCCAAGGAACCUAAUUGAAA | No. 2322 | UCAAUUAGGUUCCUUGGAUGA |
| AH1343 | No. 1143 | UCCAAGGAACCUAAUUGAAAU | No. 2323 | UUCAAUUAGGUUCCUUGGAUG |
| AH1144 | No. 1144 | CCAAGGAACCUAAUUGAAAUU | No. 2324 | UUUCAAUUAGGUUCCUUGGAU |
| AH1145 | No. 1145 | CAAGGAACCUAAUUGAAAUUU | No. 2325 | AUUUCAAUUAGGUUCCUUGGA |
| AH1146 | No. 1146 | AAGGAACCUAAUUGAAAUUUA | No. 2326 | AAUUUCAAUUAGGUUCCUUGG |
| AH1147 | No. 1147 | AGGAACCUAAUUGAAAUUUAA | No. 2327 | AAAUUUCAAUUAGGUUCCUUG |
| AH1148 | No. 1148 | GGAACCUAAUUGAAAUUUAAA | No. 2328 | UAAAUUUCAAUUAGGUUCCUU |
| AH1149 | No. 1149 | GAACCUAAUUGAAAUUUAAAA | No. 2329 | UUAAAUUUCAAUUAGGUUCCU |
| | Double | | | Relative |
| | stranded | | | expressed |
| | nucleic | | Target β2GPI | amount |
| | acid No. | SEQ ID NO. | mRNA sequence | of β2GPI |
| | AH1096 | No. 3456 | GGTGGTTTTCAGATTCCAC | 0.076 |
| | AH1097 | No. 3457 | GTGGTTTTCAGATTCCACA | 0.045 |
| | AH1099 | No. 3459 | GGTTTTCAGATTCCACACA | 0.140 |
| | AH1100 | No. 3460 | GTTTTCAGATTCCACACAA | 0.120 |
| | AH1101 | No. 3461 | TTTTCAGATTCCACACAAA | 0.121 |
| | AH1102 | No. 3462 | TTTCAGATTCCACACAAAA | 0.281 |
| | AH1103 | No. 3463 | TTCAGATTCCACACAAAAT | 0.197 |
| | AH1104 | No. 3464 | TCAGATTCCACACAAAATG | 0.274 |
| | AH1105 | No. 3465 | CAGATTCCACACAAAATGT | 0.193 |
| | AHI106 | No. 3466 | AGATTCCACACAAAATGTC | 0.175 |
| | AH1107 | No. 3467 | GATTCCACACAAAATGTCA | 0.095 |
| | AH1109 | No. 3469 | TTCCACACAAAATGTCACA | 0.193 |
| | AH1111 | No. 3471 | CCACACAAAATGTCACACT | 0.147 |
| | AH1112 | No. 3472 | CACACAAAATGTCACACTT | 0.067 |
| | AH1113 | No. 3473 | ACACAAAATGTCACACTTG | 0.186 |
| | AH1114 | No. 3474 | CACAAAATGTCACACTTGT | 0.082 |
| | AH1115 | No. 3475 | ACAAAATGTCACACTTGTT | 0.229 |
| | AH1116 | No. 3476 | CAAAATGTCACACTTGTTT | 0.074 |
| | AH1118 | No. 3478 | AAATGTCACACTTGTTTCT | 0 073 |
| | AH1120 | No. 3480 | ATGTCACACTTGTTTCTTG | 0.140 |
| | AH1121 | No. 3481 | TGTCACACTTGTTTCTTGT | 0.090 |
| | AH1122 | No. 3482 | GTCACACTTGTTTCTTGTT | 0.085 |
| | AH1124 | No. 3484 | CACACTTGTTTCTTGTTCA | 0.050 |
| | AH1125 | No. 3455 | ACACTTGTTTCTTGTTCAT | 0.065 |
| | AH1127 | No. 3487 | ACTTGTTTCTTGTTCATCC | 0.169 |
| | AH1126 | No. 3488 | CTTGTTTCTTGTTCATCCA | 0.029 |
| | AH1129 | No. 3489 | TTGTTTCTTGTTCATCCAA | 0.065 |
| | AH1130 | No. 3490 | TGTTTCTTGTTCATCCAAG | 0.307 |
| | AH1131 | No. 3491 | GTTTCTTGTTCATCCAAGG | 0.163 |
| | AH1133 | No. 3493 | TTCTTGTTCATCCAAGGAA | 0.196 |
| | AH1134 | No. 3494 | TCTTGTTCATCCAAGGAAC | 0.251 |
| | AH1135 | No. 3495 | CTTGTTCATCCAAGGAACC | 0.145 |
| | AH1136 | No. 3495 | TTGTTCATCCAAGGAACCT | 0.219 |
| | AH1137 | No. 3497 | TGTTCATCCAAGGAACCTA | 0.044 |
| | AH1138 | No. 3495 | GTTCATCCAAGGAACCTAA | 0 036 |
| | AH1139 | No. 3499 | TTCATCCAAGGAACCTAAT | 0 061 |
| | AH1140 | No. 3500 | TCATCCAAGGAACCTAATT | 0.110 |
| | AH1141 | No. 3501 | CATCCAAGGAACCTAATTG | 0.063 |
| | AH1142 | No. 3502 | ATCCAAGGAACCTAATTGA | 0.045 |
| | AH1343 | No. 3503 | TCCAAGGAACCTAATTGAA | 0.042 |
| | AH1144 | No. 3504 | CCAAGGAACCTAATTGAAA | 0.036 |
| | AH1145 | No. 3505 | CAAGGAACCTAATTGAAAT | 0 042 |
| | AH1146 | No. 3506 | AAGGAACCTAATTGAAATT | 0.056 |
| | AH1147 | No. 3507 | AGGAACCTAATTGAAATTT | 0.244 |
| | AH1148 | No. 3508 | GGAACCTAATTGAAATTTA | 0 037 |
| | AH1149 | No. 3509 | GAACCTAATTGAAATTTAA | 0.034 |

TABLE 4-16

| Double | | | | | |
|---|---|---|---|---|---|
| stranded | | | | | |
| nucleic | SEQ ID | Sense strand sequence | | Antisense strand sequence | |
| acid No. | NO. | (5′→3′) | SEQ ID NO. | (5′→3′) | SEQ ID NO. |
| AH1150 | No. 1150 | AACCUAAUUGAAAUUUAAAAA | No. 2330 | UUUAAAUUUCAAUUAGGUUCC | No. 3510 |
| AH1151 | No. 1151 | ACCUAAUUGAAAUUUAAAAAU | No. 2331 | UUUUAAAUUUCAAUUAGGUUC | No. 3511 |
| AH1155 | No. 1155 | AAUUGAAAUUUAAAAAUAAAG | No. 2335 | UUAUUUUUAAAUUUCAAUUAG | No. 3515 |
| AH1167 | No. 1167 | AAAAUAAAGCUACUGAAUUUA | No. 2347 | AAUUCAGUAGCUUUAUUUUUA | No. 3527 |
| AH1168 | No. 1168 | AAAUAAAGCUACUGAAUUUAU | No. 2348 | AAAUUCAGUAGCUUUAUUUUU | No. 3528 |
| AH1169 | No. 1169 | AAUAAAGCUACUGAAUUUAUU | No. 2349 | UAAAUUCAGUAGCUUUAUUUU | No. 3529 |
| AH1171 | No. 1171 | UAAAGCUACUGAAUUUAUUGC | No. 2351 | AAUAAAUUCAGUAGCUUUAUU | No. 3531 |
| AH1175 | No. 1175 | GCUACUGAAUUUAUUGCCGCA | No. 2355 | CGGCAAUAAAUUCAGUAGCUU | No. 3535 |
| AH1176 | No. 1176 | CUACUGAAUUUAUUGCCGCAC | No. 2356 | GCGGCAAUAAAUUCAGUAGCU | No. 3536 |
| AH1177 | No. 1177 | UACUGAAUUUAUUGCCGCACC | No. 2357 | UGCGGCAAUAAAUUCAGUAGC | No. 3537 |
| AH1178 | No. 1178 | ACUGAAUUUAUUGCCGCACCC | No. 2358 | GUGCGGCAAUAAAUUCAGUAG | No. 3538 |
| | | | Double | | |
| | | | stranded | | |
| | | | nucleic | Target β2GPI | Relative expressed |
| | | | acid No. | mRNA sequence | amount of β2GPI |
| | | | AH1150 | AACCTAATTGAAATTTAAA | 0.097 |
| | | | AH1151 | ACCTAATTGAAATTTAAAA | 0.330 |
| | | | AH1155 | AATTGAAATTTAAAAATAA | 0.318 |
| | | | AH1167 | AAAATAAAGCTACTGAATT | 0.313 |
| | | | AH1168 | AAATAAAGCTACTGAATTT | 0.082 |
| | | | AH1169 | AATAAAGCTACTGAATTTA | 0.174 |
| | | | AH1171 | TAAAGCTACTGAATTTATT | 0.191 |
| | | | AH1175 | GCTACTGAATTTATTGCCG | 0.156 |
| | | | AH1176 | CTACTGAATTTATTGCCGC | 0.230 |
| | | | AH1177 | TACTGAATTTATTGCCGCA | 0.155 |
| | | | AH1178 | ACTGAATTTATTGCCGCAC | 0.309 |

[0287] In order to select double-stranded nucleic acids having high knockdown activity, the relative expressed amount of the β2GPI gene was calculated in the same experimental system with the final concentration of the double-stranded nucleic acid decreased to 10 pmol/L. The results are described in Table 5.

TABLE 5

| Double stranded | Relative expressed | Double stranded | Relative expressed |
|---|---|---|---|
| nucleic acid No. | amount of β2GPI | nucleic acid No. | amount of β2GPI |
| AH0075 | 0.206 | AH0808 | 0.283 |
| AH0096 | 0.204 | AH0821 | 0.257 |
| AH0099 | 0.159 | AH0825 | 0.230 |
| AH0119 | 0.170 | AH0832 | 0.277 |
| AH0125 | 0.108 | AH0876 | 0.246 |
| AH0126 | 0.143 | AH0879 | 0.168 |
| AH0133 | 0.202 | AH0883 | 0.173 |
| AH0134 | 0.256 | AH0887 | 0.243 |
| AH0149 | 0.172 | AH0943 | 0.110 |
| AH0152 | 0.114 | AH1022 | 0.288 |
| AH0154 | 0.219 | AH1025 | 0.218 |
| AH0155 | 0.206 | AH1031 | 0.264 |
| AH0181 | 0.240 | AH1038 | 0.277 |
| AH0184 | 0.170 | AH1039 | 0.212 |
| AH0185 | 0.104 | AH1077 | 0.292 |
| AH0187 | 0.117 | AH1092 | 0.240 |
| AH0188 | 0.180 | AH1095 | 0.282 |
| AH0193 | 0.254 | AH1097 | 0.201 |
| AH0236 | 0.127 | AH1112 | 0.156 |
| AH0275 | 0.192 | AH1116 | 0.291 |
| AH0296 | 0.214 | AH1118 | 0.268 |
| AH0324 | 0.255 | AH1124 | 0.160 |
| AH0330 | 0.265 | AH1125 | 0.215 |
| AH0345 | 0.242 | AH1128 | 0.164 |
| AH0371 | 0.167 | AH1129 | 0.276 |
| AH0394 | 0.285 | AH1137 | 0.288 |
| AH0504 | 0.282 | AH1139 | 0.165 |
| AH0528 | 0.197 | AH1141 | 0.130 |
| AH0529 | 0.107 | AH1142 | 0.078 |
| AH0592 | 0.279 | AH1143 | 0.110 |
| AH0689 | 0.178 | AH1144 | 0.073 |
| AH0693 | 0.206 | AH1145 | 0.091 |
| AH0705 | 0.281 | AH1146 | 0.178 |
| AH0712 | 0.149 | AH1148 | 0.106 |
| AH0713 | 0.199 | AH1149 | 0.110 |

### Example 1

### Preparation of Nucleic Acid Conjugate Containing β2GPI Gene-Suppressing Double-Stranded Nucleic Acid (siRNA) and a Ligand Part

[0288] Step 1

[0289] β2GPI-targeting siRNAs (G-CH1179-s, G-CH0099-s and G-CH1180-s) having a ligand part at the 3′ end of the antisense strand of CH1179, CH0099 or CH1180 were synthesized on a scale of 0.2 μmol with a nucleic acid synthesizer (Ultra Fast Parallel Synthesizer, Sigma, hereinafter UFPS). Compound 9 obtained in step 7 of Reference Example 2 was used as the solid-phase carrier. DMT-2′-O-methyl-rA((tert-butyl)phenoxyacetyl)amidite (SAFC-Proligo), DMT-2′-fluoro-dA(benzoyl)amidite (SAFC-Proligo), DMT-2′-O-methyl-rG ((tert-butyl)phenoxyacetyl)amidite (SAFC-Proligo), DMT-2′-fluoro-dG(isobutyryl)amidite (SAFC-Proligo), DMT-2′-O-methyl-rC((tert-butyl)phenoxyacetyl)amidite (SAFC-Proligo), DMT-2′-fluoro-dC(acetyl)amidite (SAFC-Proligo), DMT-2′-O-methyl-rU amidite (SAFC-Proligo) and DMT-2′-fluoro-dU amidite (SAFC-Proligo) were prepared as 0.1 mol/L acetonitrile solutions, chemical phosphorylation reagent II (Glen Research Corporation) was prepared as a 0.06 mol/L acetonitrile solution, and sulfurization reagent II (Glen Research Corporation) was prepared as a 0.05 mol/L acetonitrile solution, and they were used for a condensation reaction. Deblocking solution I (3% trichloracetic acid dichloromethane solution, Wako Pure Chemical Industries, Ltd.) was used as a deprotection reagent. 5-benzylthio-1H-tetrazole (SAFC-Proligo) was used as a phosphoramidite activator, and the condensation time was 10 minutes each. After synthesis with trityl-off, the product was immersed in 28% ammonia solution, and left standing for 4 hours at 55° C. This was concentrated under reduced pressure, and 1-butanol was added to stop the reaction. This was then purified by reverse-phase liquid chromatography (Shiseido Capsell Pak C18, SG300, 6.0 mm×75 mm, 5% acetonitrile/0.1% triethyl ammonium acetate buffer, B solution: 50% acetonitrile/water gradient) to obtain the target oligonucleotide. The results are described in Table 6.

TABLE 6

| | | Molecular | Molecular |
|---|---|---|---|
| | | weight | weight |
| | | (theoretical | (Measured |
| Compound | Sequence (5′→3′) | value) | value) |
| G-CH1179-s | C (F) [symbol] U (M) [symbol] C (F) U (M) G (F) C (M) C (F) A (M) U (F) G (M) U (F) | 8558.3 | 8556.4 |
| | U (F) G (M) C (F) U (M) A (F) U (M) U (F) G (M) C (F) A (M) X | | |
| G-CH0099-s | U (F) [symbol] G (M) [symbol] C (F) C (M) A (F) U (M) G (F) U (M) U (F) G (M) C (F) | 8661.3 | 8659.4 |
| | U (F) A (M) U (F) U (M) G (F) C (M) A (F) G (F) G (F) A (M) X | | |
| G-CH1180-s | G (F) [symbol] C (M) [symbol] U (F) G (M) G (F) A (M) A (F) U (M) C (F) U (M) U (F) | 8755.5 | 8758.0 |
| | A (F) G (M) A (F) A (M) A (F) A (M) U (F) G (M) G (F) A (M) X | | |

[symbol]

indicates data missing or illegible when filed

(wherein, N(M) represents 2′-O-methyl modified RNA, N(F) represents 2′-fluorine modified RNA, A represents phosphorothioate modification, and X represents the ligand part in the nucleic acid conjugate I in Table 1. The phrase “ligand part in the nucleic acid conjugate in Table 1” means a structure of the nucleic acid conjugate I excluding the oligonucleotide part.)

[0290] Step 2

[0291] The resulting single-stranded oligonucleotide was dissolved in a mixed buffer [100 mmol/L potassium acetate, 30 mmol/L 2-[4-(2-hydroxyethyl)piperazin-1-yl]ethanesulfonic acid, HEPES)-KOH (pH 7.4), 2 mmol/L magnesium acetate] so as to be a concentration of 50 μmol/L. The sense strand and the antisense strand were mixed in equal quantities, and left standing for 10 minutes at 80° C. The sense strand sequences were as shown by CH1179, CH0099 and CH1180 in Tables 3-2 and 3-18. The temperature was lowered gradually, and it was left standing for 1 hour at 37° C. to obtain a double-stranded oligonucleotide. The resulting nucleic acid conjugates in which a ligand part was attached to the double-stranded nucleic acid (siRNA) of CH1179, CH0099 or CH1180 were called G-CH1179, G-CH0099 and G-CH1180.

### Test Example 2

### In Vitro Activity of Nucleic Acid Conjugate in Mouse Primary Hepatocytes

[0292] Each of the nucleic acid conjugates obtained in Example 1 was introduced into mouse primary hepatocytes from CD-1 (Life Technologies Corporation, Catalog No. MSCP10) by the method described below.

[0293] Each nucleic acid conjugate was diluted with Opti-MEM (Gibco, 31985) so as to be a final concentration of 10 or 3 nmol/L, and 20 μL of the dilution was dispensed into each well of a 96-well culture plate, to which mouse primary hepatocytes suspended in William's E Medium (Life Technologies Corporation, Catalog No. A12176-01) containing Primary Hepatocyte Thawing and Plating Supplements (Life Technologies Corporation, Catalog No. CM3000) were seeded so as to be 12,500 cells/80 μL/well. The plate was cultured for 6 hours under conditions of 37° C., 5% CO₂ The culture supernatant was carefully removed and William's E Medium containing Primary Hepatocyte Maintenance Supplements (Life Technologies Corporation, Catalog No. CM4000) was added. Untreated cells were also seeded as a negative control group.

[0294] The cells to which each preparation was introduced were cultured for 18 hours in an incubator under conditions of 37° C., 5% CO₂ and washed with ice-cooled phosphate-buffered saline. Total RNA was collected using a Cells-to-Ct kit (Applied Bioscience (ABI), Catalog No. AM1728) according to the method described in the attached instruction, and cDNA was prepared by a reverse transcription reaction using the resulting total RNA as a template.

[0295] Using the resulting cDNA as a template and a Universal Probe Library (Roche Applied Science, 04683633001) as a probe, a PCR reaction was performed with AB17900HT Fast (ABI) according to the method described in the attached instruction to amplify the mRNAs of the β2GPI gene and D-glyceraldehyde-3-phosphate dehydrogenase (hereinafter referred to as gapdh) gene (which is a constitutively expressed gene). The amplified amounts of the mRNAs were measured, and the semi-quantitative value of the β2GPI mRNA was calculated using the amplified amount of the gapdh mRNA as an internal control. The semi-quantitative value of the β2GPI mRNA of the negative control measured in the same way being set to be 1.0, the expression rate of the β2GPI mRNA was determined from the semi-quantitative value of the β2GPI mRNA. The results for expression rate of the β2GPI mRNA are described in Table 7 as IC50 values.

TABLE 7

| | Nucleic acid conjugate name | | | | | |
|---|---|---|---|---|---|---|
| | G-CH1179 | | G-CH0099 | | G-CH1180 | |
| Dosage (nmol/L) | 10 | 3 | 10 | 3 | 10 | 3 |
| Amount of β2GPI mRNA | 98.7 | 96.4 | 80.4 | 67.6 | 95.6 | 86.1 |
| (suppression rate %) | | | | | | |

[0296] It is clear from Table 7 that each nucleic acid conjugate obtained in Example 1 and introduced into mouse primary hepatocytes suppressed expression of β2GPI gene mRNA.

### Test Example 3

### In Vivo Activity of Nucleic Acid Conjugate in Mice

[0297] Each nucleic acid conjugate obtained in Example 1 was evaluated in vivo by the following method. Each nucleic acid conjugate was diluted with phosphate-buffered saline (DPBS, Nacalai Tesque, Inc.) for testing purposes. Mice (Balb/c, obtained from CLEA Japan, Inc.) were tamed, and each nucleic acid conjugate was administered to the mice subcutaneously at dosages of 3 mg/kg or 20 mg/kg. 3 days after administration, the livers were harvested and stored frozen with liquid nitrogen. Total RNA was then collected from the frozen liver samples with Trizol® RNA Isolation Reagents (Life Technologies Corporation, Catalog No. 15596026) and an RNeasy Mini Kit ((Qiagen N.V.), Catalog No. 74106) according to the method described in the attached instruction. Using the resulting RNA as a template, cDNA was then prepared by a reverse transcription reaction with a Transcriptor First Strand cDNA Synthesis Kit (Roche, Catalog No. 04897030001) according to the method described in the attached instruction. Using the resulting cDNA as a template and a TaqMan® Gene Expression Assays Probe (Applied Biosystems, Inc.) as a probe, a PCR reaction was performed with AB17900 HT Fast (ABI) according to the method described in the attached instruction to amplify the mRNAs of the β2GPI gene and D-glyceraldehyde-3-phosphate dehydrogenase (hereinafter referred to as gapdh) gene (which is a constitutively expressed gene). The amplified amounts of the mRNAs were measured, and the semi-quantitative value of the β2GPI mRNA was calculated using the amplified amount of the gapdh mRNA as an internal control. The semi-quantitative value of the β2GPI mRNA of the group receiving phosphate-buffered saline measured in the same way being set to be 1, the expression rate of the β2GPI mRNA was determined from the semi-quantitative value of the β2GPI mRNA. The results for expression rate of the β2GPI mRNA are described in Table 8.

TABLE 8

| | Nucleic acid conjugate name | | | | | |
|---|---|---|---|---|---|---|
| | G-CH1179 | | G-CH0099 | | G-CH1180 | |
| Dosage (mg/kg) | 3 | 20 | 3 | 20 | 3 | 20 |
| Amount of β2GPI mRNA in | 88.2 | 98.6 | 80.2 | 98.6 | 57.1 | 95.8 |
| liver (suppression rate %) | | | | | | |

[0298] It is clear from Table 8 that a β2GPI-associated disease can be treated by administering the nucleic acid conjugate of the present invention to a mammal and reducing expression of the β2GPI gene in vivo.

### INDUSTRIAL APPLICABILITY

[0299] An administration of the nucleic acid conjugate of the present invention to a mammal can suppress β2GPI gene expression in vivo and thereby treat a β2GPI-associated disease.

### SEQUENCE LISTING FREE TEXT

[0300] SEQ ID NOS: 1 to 1180 represent sense strand RNA base sequences of siRNA for a β2GPI gene.

[0301] SEQ ID NOS: 1181 to 2360 represent antisense strand RNA base sequences of siRNA for a β2GPI gene.

[0302] SEQ ID NOS: 2361 to 3540 represent DNA base sequences for a target β2GPI gene.

[0303] SEQ ID NO: 3541 represents the cDNA base sequence of a β2GPI gene.

[0304] SEQ ID NOS: 4001 to 4702 represent the sense strand RNA base sequences of double-stranded nucleic acids (BH033 to BH1180).

[0305] SEQ ID NOS: 4703 to 5404 represent the antisense strand RNA base sequences of double-stranded nucleic acids (BH033 to BH1180).

[0306] SEQ ID NOS: 5405 to 6106 represent the sense strand RNA base sequences of double-stranded nucleic acids (CH033 to CH1180).

[0307] SEQ ID NOS: 6107 to 6808 represent the antisense strand RNA base sequences of double-stranded nucleic acids (CH033 to CH1180).

The application's sequence listing, which the Patent Office published only in electronic form, follows.

SEQUENCE LISTING (6808 sequences)

SEQ ID NO: 1 - RNA, 21 nt, Artificial Sequence
  siRNA sense strand against b2GPI
cucugucuuuuuagcagacga

SEQ ID NO: 2 - RNA, 21 nt, Artificial Seqence
  siRNA sense strand against b2GPI
ucugucuuuuuagcagacgaa

SEQ ID NO: 3 - RNA, 21 nt, Artificial Seqence
  siRNA sense strand against b2GPI
cugucuuuuuagcagacgaaa

SEQ ID NO: 4 - RNA, 21 nt, Artificial Seqence
  siRNA sense strand against b2GPI
ugucuuuuuagcagacgaaaa

SEQ ID NO: 5 - RNA, 21 nt, Artificial Seqence
  siRNA sense strand against b2GPI
gucuuuuuagcagacgaaaac

SEQ ID NO: 6 - RNA, 21 nt, Artificial Seqence
  siRNA sense strand against b2GPI
ucuuuuuagcagacgaaaacc

SEQ ID NO: 7 - RNA, 21 nt, Artificial Seqence
  siRNA sense strand against b2GPI
cuuuuuagcagacgaaaacca

SEQ ID NO: 8 - RNA, 21 nt, Artificial Seqence
  siRNA sense strand against b2GPI
uuuuuagcagacgaaaaccac

SEQ ID NO: 9 - RNA, 21 nt, Artificial Seqence
  siRNA sense strand against b2GPI
uuuuagcagacgaaaaccacu

SEQ ID NO: 10 - RNA, 21 nt, Artificial Seqence
  siRNA sense strand against b2GPI
uuuagcagacgaaaaccacuu

SEQ ID NO: 11 - RNA, 21 nt, Artificial Seqence
  siRNA sense strand against b2GPI
uuagcagacgaaaaccacuuu

SEQ ID NO: 12 - RNA, 21 nt, Artificial Seqence
  siRNA sense strand against b2GPI
uagcagacgaaaaccacuuug

SEQ ID NO: 13 - RNA, 21 nt, Artificial Seqence
  siRNA sense strand against b2GPI
agcagacgaaaaccacuuugg

SEQ ID NO: 14 - RNA, 21 nt, Artificial Seqence
  siRNA sense strand against b2GPI
gcagacgaaaaccacuuuggu

SEQ ID NO: 15 - RNA, 21 nt, Artificial Seqence
  siRNA sense strand against b2GPI
cagacgaaaaccacuuuggua

SEQ ID NO: 16 - RNA, 21 nt, Artificial Seqence
  siRNA sense strand against b2GPI
agacgaaaaccacuuugguag

SEQ ID NO: 17 - RNA, 21 nt, Artificial Seqence
  siRNA sense strand against b2GPI
gacgaaaaccacuuugguagu

SEQ ID NO: 18 - RNA, 21 nt, Artificial Seqence
  siRNA sense strand against b2GPI
acgaaaaccacuuugguagug

SEQ ID NO: 19 - RNA, 21 nt, Artificial Seqence
  siRNA sense strand against b2GPI
cgaaaaccacuuugguagugc

SEQ ID NO: 20 - RNA, 21 nt, Artificial Seqence
  siRNA sense strand against b2GPI
gaaaaccacuuugguagugcc

SEQ ID NO: 21 - RNA, 21 nt, Artificial Seqence
  siRNA sense strand against b2GPI
aaaaccacuuugguagugcca

SEQ ID NO: 22 - RNA, 21 nt, Artificial Seqence
  siRNA sense strand against b2GPI
aaaccacuuugguagugccag

SEQ ID NO: 23 - RNA, 21 nt, Artificial Seqence
  siRNA sense strand against b2GPI
aaccacuuugguagugccagu

SEQ ID NO: 24 - RNA, 21 nt, Artificial Seqence
  siRNA sense strand against b2GPI
accacuuugguagugccagug

SEQ ID NO: 25 - RNA, 21 nt, Artificial Seqence
  siRNA sense strand against b2GPI
ccacuuugguagugccagugu

SEQ ID NO: 26 - RNA, 21 nt, Artificial Seqence
  siRNA sense strand against b2GPI
cacuuugguagugccagugug

SEQ ID NO: 27 - RNA, 21 nt, Artificial Seqence
  siRNA sense strand against b2GPI
acuuugguagugccaguguga

SEQ ID NO: 28 - RNA, 21 nt, Artificial Seqence
  siRNA sense strand against b2GPI
cuuugguagugccagugugac

SEQ ID NO: 29 - RNA, 21 nt, Artificial Seqence
  siRNA sense strand against b2GPI
uuugguagugccagugugacu

SEQ ID NO: 30 - RNA, 21 nt, Artificial Seqence
  siRNA sense strand against b2GPI
uugguagugccagugugacuc

SEQ ID NO: 31 - RNA, 21 nt, Artificial Seqence
  siRNA sense strand against b2GPI
ugguagugccagugugacuca

SEQ ID NO: 32 - RNA, 21 nt, Artificial Seqence
  siRNA sense strand against b2GPI
gguagugccagugugacucau

SEQ ID NO: 33 - RNA, 21 nt, Artificial Seqence
  siRNA sense strand against b2GPI
guagugccagugugacucauc

SEQ ID NO: 34 - RNA, 21 nt, Artificial Seqence
  siRNA sense strand against b2GPI
uagugccagugugacucaucc

SEQ ID NO: 35 - RNA, 21 nt, Artificial Seqence
  siRNA sense strand against b2GPI
agugccagugugacucaucca

SEQ ID NO: 36 - RNA, 21 nt, Artificial Seqence
  siRNA sense strand against b2GPI
gugccagugugacucauccac

SEQ ID NO: 37 - RNA, 21 nt, Artificial Seqence
  siRNA sense strand against b2GPI
ugccagugugacucauccaca

SEQ ID NO: 38 - RNA, 21 nt, Artificial Seqence
  siRNA sense strand against b2GPI
gccagugugacucauccacaa

SEQ ID NO: 39 - RNA, 21 nt, Artificial Seqence
  siRNA sense strand against b2GPI
ccagugugacucauccacaau

SEQ ID NO: 40 - RNA, 21 nt, Artificial Seqence
  siRNA sense strand against b2GPI
cagugugacucauccacaaug

SEQ ID NO: 41 - RNA, 21 nt, Artificial Seqence
  siRNA sense strand against b2GPI
agugugacucauccacaauga

SEQ ID NO: 42 - RNA, 21 nt, Artificial Seqence
  siRNA sense strand against b2GPI
gugugacucauccacaaugau

SEQ ID NO: 43 - RNA, 21 nt, Artificial Seqence
  siRNA sense strand against b2GPI
ugugacucauccacaaugauu

SEQ ID NO: 44 - RNA, 21 nt, Artificial Seqence
  siRNA sense strand against b2GPI
gugacucauccacaaugauuu

SEQ ID NO: 45 - RNA, 21 nt, Artificial Seqence
  siRNA sense strand against b2GPI
ugacucauccacaaugauuuc

SEQ ID NO: 46 - RNA, 21 nt, Artificial Seqence
  siRNA sense strand against b2GPI
gacucauccacaaugauuucu

SEQ ID NO: 47 - RNA, 21 nt, Artificial Seqence
  siRNA sense strand against b2GPI
acucauccacaaugauuucuc

SEQ ID NO: 48 - RNA, 21 nt, Artificial Seqence
  siRNA sense strand against b2GPI
cucauccacaaugauuucucc

SEQ ID NO: 49 - RNA, 21 nt, Artificial Seqence
  siRNA sense strand against b2GPI
ucauccacaaugauuucucca

SEQ ID NO: 50 - RNA, 21 nt, Artificial Seqence
  siRNA sense strand against b2GPI
cauccacaaugauuucuccag

SEQ ID NO: 51 - RNA, 21 nt, Artificial Seqence
  siRNA sense strand against b2GPI
auccacaaugauuucuccagu

SEQ ID NO: 52 - RNA, 21 nt, Artificial Seqence
  siRNA sense strand against b2GPI
uccacaaugauuucuccagug

SEQ ID NO: 53 - RNA, 21 nt, Artificial Seqence
  siRNA sense strand against b2GPI
ccacaaugauuucuccagugc

SEQ ID NO: 54 - RNA, 21 nt, Artificial Seqence
  siRNA sense strand against b2GPI
cacaaugauuucuccagugcu

SEQ ID NO: 55 - RNA, 21 nt, Artificial Seqence
  siRNA sense strand against b2GPI
acaaugauuucuccagugcuc

SEQ ID NO: 56 - RNA, 21 nt, Artificial Seqence
  siRNA sense strand against b2GPI
caaugauuucuccagugcuca

SEQ ID NO: 57 - RNA, 21 nt, Artificial Seqence
  siRNA sense strand against b2GPI
aaugauuucuccagugcucau

SEQ ID NO: 58 - RNA, 21 nt, Artificial Seqence
  siRNA sense strand against b2GPI
augauuucuccagugcucauc

SEQ ID NO: 59 - RNA, 21 nt, Artificial Seqence
  siRNA sense strand against b2GPI
ugauuucuccagugcucaucu

SEQ ID NO: 60 - RNA, 21 nt, Artificial Seqence
  siRNA sense strand against b2GPI
gauuucuccagugcucaucuu

SEQ ID NO: 61 - RNA, 21 nt, Artificial Seqence
  siRNA sense strand against b2GPI
auuucuccagugcucaucuug

SEQ ID NO: 62 - RNA, 21 nt, Artificial Seqence
  siRNA sense strand against b2GPI
uuucuccagugcucaucuugu

SEQ ID NO: 63 - RNA, 21 nt, Artificial Seqence
  siRNA sense strand against b2GPI
uucuccagugcucaucuuguu

SEQ ID NO: 64 - RNA, 21 nt, Artificial Seqence
  siRNA sense strand against b2GPI
ucuccagugcucaucuuguuc

SEQ ID NO: 65 - RNA, 21 nt, Artificial Seqence
  siRNA sense strand against b2GPI
cuccagugcucaucuuguucu

SEQ ID NO: 66 - RNA, 21 nt, Artificial Seqence
  siRNA sense strand against b2GPI
uccagugcucaucuuguucuc

SEQ ID NO: 67 - RNA, 21 nt, Artificial Seqence
  siRNA sense strand against b2GPI
ccagugcucaucuuguucucg

SEQ ID NO: 68 - RNA, 21 nt, Artificial Seqence
  siRNA sense strand against b2GPI
cagugcucaucuuguucucga

SEQ ID NO: 69 - RNA, 21 nt, Artificial Seqence
  siRNA sense strand against b2GPI
agugcucaucuuguucucgag

SEQ ID NO: 70 - RNA, 21 nt, Artificial Seqence
  siRNA sense strand against b2GPI
gugcucaucuuguucucgagu

SEQ ID NO: 71 - RNA, 21 nt, Artificial Seqence
  siRNA sense strand against b2GPI
ugcucaucuuguucucgaguu

SEQ ID NO: 72 - RNA, 21 nt, Artificial Seqence
  siRNA sense strand against b2GPI
gcucaucuuguucucgaguuu

SEQ ID NO: 73 - RNA, 21 nt, Artificial Seqence
  siRNA sense strand against b2GPI
cucaucuuguucucgaguuuu

SEQ ID NO: 74 - RNA, 21 nt, Artificial Seqence
  siRNA sense strand against b2GPI
ucaucuuguucucgaguuuuc

SEQ ID NO: 75 - RNA, 21 nt, Artificial Seqence
  siRNA sense strand against b2GPI
caucuuguucucgaguuuucu

SEQ ID NO: 76 - RNA, 21 nt, Artificial Seqence
  siRNA sense strand against b2GPI
aucuuguucucgaguuuucuc

SEQ ID NO: 77 - RNA, 21 nt, Artificial Seqence
  siRNA sense strand against b2GPI
ucuuguucucgaguuuucucu

SEQ ID NO: 78 - RNA, 21 nt, Artificial Seqence
  siRNA sense strand against b2GPI
cuuguucucgaguuuucucug

SEQ ID NO: 79 - RNA, 21 nt, Artificial Seqence
  siRNA sense strand against b2GPI
uuguucucgaguuuucucugc

SEQ ID NO: 80 - RNA, 21 nt, Artificial Seqence
  siRNA sense strand against b2GPI
uguucucgaguuuucucugcc

SEQ ID NO: 81 - RNA, 21 nt, Artificial Seqence
  siRNA sense strand against b2GPI
guucucgaguuuucucugcca

SEQ ID NO: 82 - RNA, 21 nt, Artificial Seqence
  siRNA sense strand against b2GPI
uucucgaguuuucucugccau

SEQ ID NO: 83 - RNA, 21 nt, Artificial Seqence
  siRNA sense strand against b2GPI
ucucgaguuuucucugccaug

SEQ ID NO: 84 - RNA, 21 nt, Artificial Seqence
  siRNA sense strand against b2GPI
cucgaguuuucucugccaugu

SEQ ID NO: 85 - RNA, 21 nt, Artificial Seqence
  siRNA sense strand against b2GPI
ucgaguuuucucugccauguu

SEQ ID NO: 86 - RNA, 21 nt, Artificial Seqence
  siRNA sense strand against b2GPI
cgaguuuucucugccauguug

SEQ ID NO: 87 - RNA, 21 nt, Artificial Seqence
  siRNA sense strand against b2GPI
gaguuuucucugccauguugc

SEQ ID NO: 88 - RNA, 21 nt, Artificial Seqence
  siRNA sense strand against b2GPI
aguuuucucugccauguugcu

SEQ ID NO: 89 - RNA, 21 nt, Artificial Seqence
  siRNA sense strand against b2GPI
guuuucucugccauguugcua

SEQ ID NO: 90 - RNA, 21 nt, Artificial Seqence
  siRNA sense strand against b2GPI
uuuucucugccauguugcuau

SEQ ID NO: 91 - RNA, 21 nt, Artificial Seqence
  siRNA sense strand against b2GPI
uuucucugccauguugcuauu

SEQ ID NO: 92 - RNA, 21 nt, Artificial Seqence
  siRNA sense strand against b2GPI
uucucugccauguugcuauug

SEQ ID NO: 93 - RNA, 21 nt, Artificial Seqence
  siRNA sense strand against b2GPI
ucucugccauguugcuauugc

SEQ ID NO: 94 - RNA, 21 nt, Artificial Seqence
  siRNA sense strand against b2GPI
cucugccauguugcuauugca

SEQ ID NO: 95 - RNA, 21 nt, Artificial Seqence
  siRNA sense strand against b2GPI
ucugccauguugcuauugcag

SEQ ID NO: 96 - RNA, 21 nt, Artificial Seqence
  siRNA sense strand against b2GPI
cugccauguugcuauugcagg

SEQ ID NO: 97 - RNA, 21 nt, Artificial Seqence
  siRNA sense strand against b2GPI
ugccauguugcuauugcagga

SEQ ID NO: 98 - RNA, 21 nt, Artificial Seqence
  siRNA sense strand against b2GPI
gccauguugcuauugcaggac

SEQ ID NO: 99 - RNA, 21 nt, Artificial Seqence
  siRNA sense strand against b2GPI
ccauguugcuauugcaggacg

SEQ ID NO: 100 - RNA, 21 nt, Artificial Seqence
  siRNA sense strand against b2GPI
cauguugcuauugcaggacgg

SEQ ID NO: 101 - RNA, 21 nt, Artificial Seqence
  siRNA sense strand against b2GPI
auguugcuauugcaggacgga

SEQ ID NO: 102 - RNA, 21 nt, Artificial Seqence
  siRNA sense strand against b2GPI
uguugcuauugcaggacggac

SEQ ID NO: 103 - RNA, 21 nt, Artificial Seqence
  siRNA sense strand against b2GPI
guugcuauugcaggacggacc

SEQ ID NO: 104 - RNA, 21 nt, Artificial Seqence
  siRNA sense strand against b2GPI
uugcuauugcaggacggaccu

SEQ ID NO: 105 - RNA, 21 nt, Artificial Seqence
  siRNA sense strand against b2GPI
ugcuauugcaggacggaccug

SEQ ID NO: 106 - RNA, 21 nt, Artificial Seqence
  siRNA sense strand against b2GPI
gcuauugcaggacggaccugu

SEQ ID NO: 107 - RNA, 21 nt, Artificial Seqence
  siRNA sense strand against b2GPI
cuauugcaggacggaccuguc

SEQ ID NO: 108 - RNA, 21 nt, Artificial Seqence
  siRNA sense strand against b2GPI
uauugcaggacggaccugucc

SEQ ID NO: 109 - RNA, 21 nt, Artificial Seqence
  siRNA sense strand against b2GPI
auugcaggacggaccuguccc

SEQ ID NO: 110 - RNA, 21 nt, Artificial Seqence
  siRNA sense strand against b2GPI
uugcaggacggaccuguccca

SEQ ID NO: 111 - RNA, 21 nt, Artificial Seqence
  siRNA sense strand against b2GPI
ugcaggacggaccugucccaa

SEQ ID NO: 112 - RNA, 21 nt, Artificial Seqence
  siRNA sense strand against b2GPI
gcaggacggaccugucccaag

SEQ ID NO: 113 - RNA, 21 nt, Artificial Seqence
  siRNA sense strand against b2GPI
caggacggaccugucccaagc

SEQ ID NO: 114 - RNA, 21 nt, Artificial Seqence
  siRNA sense strand against b2GPI
aggacggaccugucccaagcc

SEQ ID NO: 115 - RNA, 21 nt, Artificial Seqence
  siRNA sense strand against b2GPI
ggacggaccugucccaagcca

SEQ ID NO: 116 - RNA, 21 nt, Artificial Seqence
  siRNA sense strand against b2GPI
gacggaccugucccaagccag

SEQ ID NO: 117 - RNA, 21 nt, Artificial Seqence
  siRNA sense strand against b2GPI
acggaccugucccaagccaga

SEQ ID NO: 118 - RNA, 21 nt, Artificial Seqence
  siRNA sense strand against b2GPI
cggaccugucccaagccagau

SEQ ID NO: 119 - RNA, 21 nt, Artificial Seqence
  siRNA sense strand against b2GPI
ggaccugucccaagccagaug

SEQ ID NO: 120 - RNA, 21 nt, Artificial Seqence
  siRNA sense strand against b2GPI
gaccugucccaagccagauga

SEQ ID NO: 121 - RNA, 21 nt, Artificial Seqence
  siRNA sense strand against b2GPI
accugucccaagccagaugau

SEQ ID NO: 122 - RNA, 21 nt, Artificial Seqence
  siRNA sense strand against b2GPI
ccugucccaagccagaugauu

SEQ ID NO: 123 - RNA, 21 nt, Artificial Seqence
  siRNA sense strand against b2GPI
cugucccaagccagaugauuu

SEQ ID NO: 124 - RNA, 21 nt, Artificial Seqence
  siRNA sense strand against b2GPI
ugucccaagccagaugauuua

SEQ ID NO: 125 - RNA, 21 nt, Artificial Seqence
  siRNA sense strand against b2GPI
gucccaagccagaugauuuac

SEQ ID NO: 126 - RNA, 21 nt, Artificial Seqence
  siRNA sense strand against b2GPI
ucccaagccagaugauuuacc

SEQ ID NO: 127 - RNA, 21 nt, Artificial Seqence
  siRNA sense strand against b2GPI
cccaagccagaugauuuacca

SEQ ID NO: 128 - RNA, 21 nt, Artificial Seqence
  siRNA sense strand against b2GPI
ccaagccagaugauuuaccau

SEQ ID NO: 129 - RNA, 21 nt, Artificial Seqence
  siRNA sense strand against b2GPI
caagccagaugauuuaccauu

SEQ ID NO: 130 - RNA, 21 nt, Artificial Seqence
  siRNA sense strand against b2GPI
aagccagaugauuuaccauuu

SEQ ID NO: 131 - RNA, 21 nt, Artificial Seqence
  siRNA sense strand against b2GPI
agccagaugauuuaccauuuu

SEQ ID NO: 132 - RNA, 21 nt, Artificial Seqence
  siRNA sense strand against b2GPI
gccagaugauuuaccauuuuc

SEQ ID NO: 133 - RNA, 21 nt, Artificial Seqence
  siRNA sense strand against b2GPI
ccagaugauuuaccauuuucc

SEQ ID NO: 134 - RNA, 21 nt, Artificial Seqence
  siRNA sense strand against b2GPI
cagaugauuuaccauuuucca

SEQ ID NO: 135 - RNA, 21 nt, Artificial Seqence
  siRNA sense strand against b2GPI
agaugauuuaccauuuuccac

SEQ ID NO: 136 - RNA, 21 nt, Artificial Seqence
  siRNA sense strand against b2GPI
gaugauuuaccauuuuccaca

SEQ ID NO: 137 - RNA, 21 nt, Artificial Seqence
  siRNA sense strand against b2GPI
augauuuaccauuuuccacag

SEQ ID NO: 138 - RNA, 21 nt, Artificial Seqence
  siRNA sense strand against b2GPI
ugauuuaccauuuuccacagu

SEQ ID NO: 139 - RNA, 21 nt, Artificial Seqence
  siRNA sense strand against b2GPI
gauuuaccauuuuccacagug

SEQ ID NO: 140 - RNA, 21 nt, Artificial Seqence
  siRNA sense strand against b2GPI
auuuaccauuuuccacagugg

SEQ ID NO: 141 - RNA, 21 nt, Artificial Seqence
  siRNA sense strand against b2GPI
uuuaccauuuuccacaguggu

SEQ ID NO: 142 - RNA, 21 nt, Artificial Seqence
  siRNA sense strand against b2GPI
uuaccauuuuccacagugguc

SEQ ID NO: 143 - RNA, 21 nt, Artificial Seqence
  siRNA sense strand against b2GPI
uaccauuuuccacaguggucc

SEQ ID NO: 144 - RNA, 21 nt, Artificial Seqence
  siRNA sense strand against b2GPI
accauuuuccacagugguccc

SEQ ID NO: 145 - RNA, 21 nt, Artificial Seqence
  siRNA sense strand against b2GPI
ccauuuuccacaguggucccg

SEQ ID NO: 146 - RNA, 21 nt, Artificial Seqence
  siRNA sense strand against b2GPI
cauuuuccacaguggucccgu

SEQ ID NO: 147 - RNA, 21 nt, Artificial Seqence
  siRNA sense strand against b2GPI
auuuuccacaguggucccguu

SEQ ID NO: 148 - RNA, 21 nt, Artificial Seqence
  siRNA sense strand against b2GPI
uuuuccacaguggucccguua

SEQ ID NO: 149 - RNA, 21 nt, Artificial Seqence
  siRNA sense strand against b2GPI
uuuccacaguggucccguuaa

SEQ ID NO: 150 - RNA, 21 nt, Artificial Seqence
  siRNA sense strand against b2GPI
uuccacaguggucccguuaaa

SEQ ID NO: 151 - RNA, 21 nt, Artificial Seqence
  siRNA sense strand against b2GPI
uccacaguggucccguuaaaa

SEQ ID NO: 152 - RNA, 21 nt, Artificial Seqence
  siRNA sense strand against b2GPI
ccacaguggucccguuaaaaa

SEQ ID NO: 153 - RNA, 21 nt, Artificial Seqence
  siRNA sense strand against b2GPI
cacaguggucccguuaaaaac

SEQ ID NO: 154 - RNA, 21 nt, Artificial Seqence
  siRNA sense strand against b2GPI
acaguggucccguuaaaaaca

SEQ ID NO: 155 - RNA, 21 nt, Artificial Seqence
  siRNA sense strand against b2GPI
caguggucccguuaaaaacau

SEQ ID NO: 156 - RNA, 21 nt, Artificial Seqence
  siRNA sense strand against b2GPI
aguggucccguuaaaaacauu

SEQ ID NO: 157 - RNA, 21 nt, Artificial Seqence
  siRNA sense strand against b2GPI
guggucccguuaaaaacauuc

SEQ ID NO: 158 - RNA, 21 nt, Artificial Seqence
  siRNA sense strand against b2GPI
uggucccguuaaaaacauucu

SEQ ID NO: 159 - RNA, 21 nt, Artificial Seqence
  siRNA sense strand against b2GPI
ggucccguuaaaaacauucua

SEQ ID NO: 160 - RNA, 21 nt, Artificial Seqence
  siRNA sense strand against b2GPI
gucccguuaaaaacauucuau

SEQ ID NO: 161 - RNA, 21 nt, Artificial Seqence
  siRNA sense strand against b2GPI
ucccguuaaaaacauucuaug

SEQ ID NO: 162 - RNA, 21 nt, Artificial Seqence
  siRNA sense strand against b2GPI
cccguuaaaaacauucuauga

SEQ ID NO: 163 - RNA, 21 nt, Artificial Seqence
  siRNA sense strand against b2GPI
ccguuaaaaacauucuaugag

SEQ ID NO: 164 - RNA, 21 nt, Artificial Seqence
  siRNA sense strand against b2GPI
cguuaaaaacauucuaugagc

SEQ ID NO: 165 - RNA, 21 nt, Artificial Seqence
  siRNA sense strand against b2GPI
guuaaaaacauucuaugagcc

SEQ ID NO: 166 - RNA, 21 nt, Artificial Seqence
  siRNA sense strand against b2GPI
uuaaaaacauucuaugagcca

SEQ ID NO: 167 - RNA, 21 nt, Artificial Seqence
  siRNA sense strand against b2GPI
uaaaaacauucuaugagccag

SEQ ID NO: 168 - RNA, 21 nt, Artificial Seqence
  siRNA sense strand against b2GPI
aaaaacauucuaugagccagg

SEQ ID NO: 169 - RNA, 21 nt, Artificial Seqence
  siRNA sense strand against b2GPI
aaaacauucuaugagccagga

SEQ ID NO: 170 - RNA, 21 nt, Artificial Seqence
  siRNA sense strand against b2GPI
aaacauucuaugagccaggag

SEQ ID NO: 171 - RNA, 21 nt, Artificial Seqence
  siRNA sense strand against b2GPI
aacauucuaugagccaggaga

SEQ ID NO: 172 - RNA, 21 nt, Artificial Seqence
  siRNA sense strand against b2GPI
acauucuaugagccaggagaa

SEQ ID NO: 173 - RNA, 21 nt, Artificial Seqence
  siRNA sense strand against b2GPI
cauucuaugagccaggagaag

SEQ ID NO: 174 - RNA, 21 nt, Artificial Seqence
  siRNA sense strand against b2GPI
auucuaugagccaggagaaga

SEQ ID NO: 175 - RNA, 21 nt, Artificial Seqence
  siRNA sense strand against b2GPI
uucuaugagccaggagaagag

SEQ ID NO: 176 - RNA, 21 nt, Artificial Seqence
  siRNA sense strand against b2GPI
ucuaugagccaggagaagaga

SEQ ID NO: 177 - RNA, 21 nt, Artificial Seqence
  siRNA sense strand against b2GPI
cuaugagccaggagaagagau

SEQ ID NO: 178 - RNA, 21 nt, Artificial Seqence
  siRNA sense strand against b2GPI
uaugagccaggagaagagauu

SEQ ID NO: 179 - RNA, 21 nt, Artificial Seqence
  siRNA sense strand against b2GPI
augagccaggagaagagauua

SEQ ID NO: 180 - RNA, 21 nt, Artificial Seqence
  siRNA sense strand against b2GPI
ugagccaggagaagagauuac

SEQ ID NO: 181 - RNA, 21 nt, Artificial Seqence
  siRNA sense strand against b2GPI
gagccaggagaagagauuacg

SEQ ID NO: 182 - RNA, 21 nt, Artificial Seqence
  siRNA sense strand against b2GPI
agccaggagaagagauuacgu

SEQ ID NO: 183 - RNA, 21 nt, Artificial Seqence
  siRNA sense strand against b2GPI
gccaggagaagagauuacgua

SEQ ID NO: 184 - RNA, 21 nt, Artificial Seqence
  siRNA sense strand against b2GPI
ccaggagaagagauuacguau

SEQ ID NO: 185 - RNA, 21 nt, Artificial Seqence
  siRNA sense strand against b2GPI
caggagaagagauuacguauu

SEQ ID NO: 186 - RNA, 21 nt, Artificial Seqence
  siRNA sense strand against b2GPI
aggagaagagauuacguauuc

SEQ ID NO: 187 - RNA, 21 nt, Artificial Seqence
  siRNA sense strand against b2GPI
ggagaagagauuacguauucc

SEQ ID NO: 188 - RNA, 21 nt, Artificial Seqence
  siRNA sense strand against b2GPI
gagaagagauuacguauuccu

SEQ ID NO: 189 - RNA, 21 nt, Artificial Seqence
  siRNA sense strand against b2GPI
agaagagauuacguauuccug

SEQ ID NO: 190 - RNA, 21 nt, Artificial Seqence
  siRNA sense strand against b2GPI
gaagagauuacguauuccugc

SEQ ID NO: 191 - RNA, 21 nt, Artificial Seqence
  siRNA sense strand against b2GPI
aagagauuacguauuccugca

SEQ ID NO: 192 - RNA, 21 nt, Artificial Seqence
  siRNA sense strand against b2GPI
agagauuacguauuccugcaa

SEQ ID NO: 193 - RNA, 21 nt, Artificial Seqence
  siRNA sense strand against b2GPI
gagauuacguauuccugcaag

SEQ ID NO: 194 - RNA, 21 nt, Artificial Seqence
  siRNA sense strand against b2GPI
agauuacguauuccugcaagc

SEQ ID NO: 195 - RNA, 21 nt, Artificial Seqence
  siRNA sense strand against b2GPI
gauuacguauuccugcaagcc

SEQ ID NO: 196 - RNA, 21 nt, Artificial Seqence
  siRNA sense strand against b2GPI
auuacguauuccugcaagccg

SEQ ID NO: 197 - RNA, 21 nt, Artificial Seqence
  siRNA sense strand against b2GPI
uuacguauuccugcaagccgg

SEQ ID NO: 198 - RNA, 21 nt, Artificial Seqence
  siRNA sense strand against b2GPI
uacguauuccugcaagccggg

SEQ ID NO: 199 - RNA, 21 nt, Artificial Seqence
  siRNA sense strand against b2GPI
acguauuccugcaagccgggc

SEQ ID NO: 200 - RNA, 21 nt, Artificial Seqence
  siRNA sense strand against b2GPI
cguauuccugcaagccgggcu

SEQ ID NO: 201 - RNA, 21 nt, Artificial Seqence
  siRNA sense strand against b2GPI
guauuccugcaagccgggcua

SEQ ID NO: 202 - RNA, 21 nt, Artificial Seqence
  siRNA sense strand against b2GPI
uauuccugcaagccgggcuau

SEQ ID NO: 203 - RNA, 21 nt, Artificial Seqence
  siRNA sense strand against b2GPI
auuccugcaagccgggcuaug

SEQ ID NO: 204 - RNA, 21 nt, Artificial Seqence
  siRNA sense strand against b2GPI
uuccugcaagccgggcuaugu

SEQ ID NO: 205 - RNA, 21 nt, Artificial Seqence
  siRNA sense strand against b2GPI
uccugcaagccgggcuaugug

SEQ ID NO: 206 - RNA, 21 nt, Artificial Seqence
  siRNA sense strand against b2GPI
ccugcaagccgggcuaugugu

SEQ ID NO: 207 - RNA, 21 nt, Artificial Seqence
  siRNA sense strand against b2GPI
cugcaagccgggcuauguguc

SEQ ID NO: 208 - RNA, 21 nt, Artificial Seqence
  siRNA sense strand against b2GPI
ugcaagccgggcuaugugucc

SEQ ID NO: 209 - RNA, 21 nt, Artificial Seqence
  siRNA sense strand against b2GPI
gcaagccgggcuauguguccc

SEQ ID NO: 210 - RNA, 21 nt, Artificial Seqence
  siRNA sense strand against b2GPI
caagccgggcuaugugucccg

SEQ ID NO: 211 - RNA, 21 nt, Artificial Seqence
  siRNA sense strand against b2GPI
aagccgggcuaugugucccga

SEQ ID NO: 212 - RNA, 21 nt, Artificial Seqence
  siRNA sense strand against b2GPI
agccgggcuaugugucccgag

SEQ ID NO: 213 - RNA, 21 nt, Artificial Seqence
  siRNA sense strand against b2GPI
gccgggcuaugugucccgagg

SEQ ID NO: 214 - RNA, 21 nt, Artificial Seqence
  siRNA sense strand against b2GPI
ccgggcuaugugucccgagga

SEQ ID NO: 215 - RNA, 21 nt, Artificial Seqence
  siRNA sense strand against b2GPI
cgggcuaugugucccgaggag

SEQ ID NO: 216 - RNA, 21 nt, Artificial Seqence
  siRNA sense strand against b2GPI
gggcuaugugucccgaggagg

SEQ ID NO: 217 - RNA, 21 nt, Artificial Seqence
  siRNA sense strand against b2GPI
ggcuaugugucccgaggaggg

SEQ ID NO: 218 - RNA, 21 nt, Artificial Seqence
  siRNA sense strand against b2GPI
gcuaugugucccgaggaggga

SEQ ID NO: 219 - RNA, 21 nt, Artificial Seqence
  siRNA sense strand against b2GPI
cuaugugucccgaggagggau

SEQ ID NO: 220 - RNA, 21 nt, Artificial Seqence
  siRNA sense strand against b2GPI
uaugugucccgaggagggaug

SEQ ID NO: 221 - RNA, 21 nt, Artificial Seqence
  siRNA sense strand against b2GPI
augugucccgaggagggauga

SEQ ID NO: 222 - RNA, 21 nt, Artificial Seqence
  siRNA sense strand against b2GPI
ugugucccgaggagggaugag

SEQ ID NO: 223 - RNA, 21 nt, Artificial Seqence
  siRNA sense strand against b2GPI
gugucccgaggagggaugaga

SEQ ID NO: 224 - RNA, 21 nt, Artificial Seqence
  siRNA sense strand against b2GPI
ugucccgaggagggaugagaa

SEQ ID NO: 225 - RNA, 21 nt, Artificial Seqence
  siRNA sense strand against b2GPI
gucccgaggagggaugagaaa

SEQ ID NO: 226 - RNA, 21 nt, Artificial Seqence
  siRNA sense strand against b2GPI
ucccgaggagggaugagaaag

SEQ ID NO: 227 - RNA, 21 nt, Artificial Seqence
  siRNA sense strand against b2GPI
cccgaggagggaugagaaagu

SEQ ID NO: 228 - RNA, 21 nt, Artificial Seqence
  siRNA sense strand against b2GPI
ccgaggagggaugagaaaguu

SEQ ID NO: 229 - RNA, 21 nt, Artificial Seqence
  siRNA sense strand against b2GPI
cgaggagggaugagaaaguuu

SEQ ID NO: 230 - RNA, 21 nt, Artificial Seqence
  siRNA sense strand against b2GPI
gaggagggaugagaaaguuua

SEQ ID NO: 231 - RNA, 21 nt, Artificial Seqence
  siRNA sense strand against b2GPI
aggagggaugagaaaguuuau

SEQ ID NO: 232 - RNA, 21 nt, Artificial Seqence
  siRNA sense strand against b2GPI
ggagggaugagaaaguuuauc

SEQ ID NO: 233 - RNA, 21 nt, Artificial Seqence
  siRNA sense strand against b2GPI
gagggaugagaaaguuuaucu

SEQ ID NO: 234 - RNA, 21 nt, Artificial Seqence
  siRNA sense strand against b2GPI
agggaugagaaaguuuaucug

SEQ ID NO: 235 - RNA, 21 nt, Artificial Seqence
  siRNA sense strand against b2GPI
gggaugagaaaguuuaucugc

SEQ ID NO: 236 - RNA, 21 nt, Artificial Seqence
  siRNA sense strand against b2GPI
ggaugagaaaguuuaucugcc

SEQ ID NO: 237 - RNA, 21 nt, Artificial Seqence
  siRNA sense strand against b2GPI
gaugagaaaguuuaucugccc

SEQ ID NO: 238 - RNA, 21 nt, Artificial Seqence
  siRNA sense strand against b2GPI
augagaaaguuuaucugcccu

SEQ ID NO: 239 - RNA, 21 nt, Artificial Seqence
  siRNA sense strand against b2GPI
ugagaaaguuuaucugcccuc

SEQ ID NO: 240 - RNA, 21 nt, Artificial Seqence
  siRNA sense strand against b2GPI
gagaaaguuuaucugcccucu

SEQ ID NO: 241 - RNA, 21 nt, Artificial Seqence
  siRNA sense strand against b2GPI
agaaaguuuaucugcccucuc

SEQ ID NO: 242 - RNA, 21 nt, Artificial Seqence
  siRNA sense strand against b2GPI
gaaaguuuaucugcccucuca

SEQ ID NO: 243 - RNA, 21 nt, Artificial Seqence
  siRNA sense strand against b2GPI
aaaguuuaucugcccucucac

SEQ ID NO: 244 - RNA, 21 nt, Artificial Seqence
  siRNA sense strand against b2GPI
aaguuuaucugcccucucaca

SEQ ID NO: 245 - RNA, 21 nt, Artificial Seqence
  siRNA sense strand against b2GPI
aguuuaucugcccucucacag

SEQ ID NO: 246 - RNA, 21 nt, Artificial Seqence
  siRNA sense strand against b2GPI
guuuaucugcccucucacagg

SEQ ID NO: 247 - RNA, 21 nt, Artificial Seqence
  siRNA sense strand against b2GPI
uuuaucugcccucucacagga

SEQ ID NO: 248 - RNA, 21 nt, Artificial Seqence
  siRNA sense strand against b2GPI
uuaucugcccucucacaggac

SEQ ID NO: 249 - RNA, 21 nt, Artificial Seqence
  siRNA sense strand against b2GPI
uaucugcccucucacaggacu

SEQ ID NO: 250 - RNA, 21 nt, Artificial Seqence
  siRNA sense strand against b2GPI
aucugcccucucacaggacug

SEQ ID NO: 251 - RNA, 21 nt, Artificial Seqence
  siRNA sense strand against b2GPI
ucugcccucucacaggacugu

SEQ ID NO: 252 - RNA, 21 nt, Artificial Seqence
  siRNA sense strand against b2GPI
cugcccucucacaggacugug

SEQ ID NO: 253 - RNA, 21 nt, Artificial Seqence
  siRNA sense strand against b2GPI
ugcccucucacaggacugugg

SEQ ID NO: 254 - RNA, 21 nt, Artificial Seqence
  siRNA sense strand against b2GPI
gcccucucacaggacuguggc

SEQ ID NO: 255 - RNA, 21 nt, Artificial Seqence
  siRNA sense strand against b2GPI
cccucucacaggacuguggcc

SEQ ID NO: 256 - RNA, 21 nt, Artificial Seqence
  siRNA sense strand against b2GPI
ccucucacaggacuguggccc

SEQ ID NO: 257 - RNA, 21 nt, Artificial Seqence
  siRNA sense strand against b2GPI
cucucacaggacuguggccca

SEQ ID NO: 258 - RNA, 21 nt, Artificial Seqence
  siRNA sense strand against b2GPI
ucucacaggacuguggcccau

SEQ ID NO: 259 - RNA, 21 nt, Artificial Seqence
  siRNA sense strand against b2GPI
cucacaggacuguggcccauc

SEQ ID NO: 260 - RNA, 21 nt, Artificial Seqence
  siRNA sense strand against b2GPI
ucacaggacuguggcccauca

SEQ ID NO: 261 - RNA, 21 nt, Artificial Seqence
  siRNA sense strand against b2GPI
cacaggacuguggcccaucaa

SEQ ID NO: 262 - RNA, 21 nt, Artificial Seqence
  siRNA sense strand against b2GPI
acaggacuguggcccaucaac

SEQ ID NO: 263 - RNA, 21 nt, Artificial Seqence
  siRNA sense strand against b2GPI
caggacuguggcccaucaaca

SEQ ID NO: 264 - RNA, 21 nt, Artificial Seqence
  siRNA sense strand against b2GPI
aggacuguggcccaucaacac

SEQ ID NO: 265 - RNA, 21 nt, Artificial Seqence
  siRNA sense strand against b2GPI
ggacuguggcccaucaacacu

SEQ ID NO: 266 - RNA, 21 nt, Artificial Seqence
  siRNA sense strand against b2GPI
gacuguggcccaucaacacuc

SEQ ID NO: 267 - RNA, 21 nt, Artificial Seqence
  siRNA sense strand against b2GPI
acuguggcccaucaacacucu

SEQ ID NO: 268 - RNA, 21 nt, Artificial Seqence
  siRNA sense strand against b2GPI
cuguggcccaucaacacucug

SEQ ID NO: 269 - RNA, 21 nt, Artificial Seqence
  siRNA sense strand against b2GPI
uguggcccaucaacacucuga

SEQ ID NO: 270 - RNA, 21 nt, Artificial Seqence
  siRNA sense strand against b2GPI
guggcccaucaacacucugaa

SEQ ID NO: 271 - RNA, 21 nt, Artificial Seqence
  siRNA sense strand against b2GPI
uggcccaucaacacucugaaa

SEQ ID NO: 272 - RNA, 21 nt, Artificial Seqence
  siRNA sense strand against b2GPI
ggcccaucaacacucugaaau

SEQ ID NO: 273 - RNA, 21 nt, Artificial Seqence
  siRNA sense strand against b2GPI
gcccaucaacacucugaaaug

SEQ ID NO: 274 - RNA, 21 nt, Artificial Seqence
  siRNA sense strand against b2GPI
cccaucaacacucugaaaugu

SEQ ID NO: 275 - RNA, 21 nt, Artificial Seqence
  siRNA sense strand against b2GPI
ccaucaacacucugaaaugua

SEQ ID NO: 276 - RNA, 21 nt, Artificial Seqence
  siRNA sense strand against b2GPI
caucaacacucugaaauguac

SEQ ID NO: 277 - RNA, 21 nt, Artificial Seqence
  siRNA sense strand against b2GPI
aucaacacucugaaauguaca

SEQ ID NO: 278 - RNA, 21 nt, Artificial Seqence
  siRNA sense strand against b2GPI
ucaacacucugaaauguacac

SEQ ID NO: 279 - RNA, 21 nt, Artificial Seqence
  siRNA sense strand against b2GPI
caacacucugaaauguacacc

SEQ ID NO: 280 - RNA, 21 nt, Artificial Seqence
  siRNA sense strand against b2GPI
aacacucugaaauguacaccc

SEQ ID NO: 281 - RNA, 21 nt, Artificial Seqence
  siRNA sense strand against b2GPI
acacucugaaauguacaccca

SEQ ID NO: 282 - RNA, 21 nt, Artificial Seqence
  siRNA sense strand against b2GPI
cacucugaaauguacacccag

SEQ ID NO: 283 - RNA, 21 nt, Artificial Seqence
  siRNA sense strand against b2GPI
acucugaaauguacacccaga

SEQ ID NO: 284 - RNA, 21 nt, Artificial Seqence
  siRNA sense strand against b2GPI
cucugaaauguacacccagag

SEQ ID NO: 285 - RNA, 21 nt, Artificial Seqence
  siRNA sense strand against b2GPI
ucugaaauguacacccagagu

SEQ ID NO: 286 - RNA, 21 nt, Artificial Seqence
  siRNA sense strand against b2GPI
cugaaauguacacccagagua

SEQ ID NO: 287 - RNA, 21 nt, Artificial Seqence
  siRNA sense strand against b2GPI
ugaaauguacacccagaguau

SEQ ID NO: 288 - RNA, 21 nt, Artificial Seqence
  siRNA sense strand against b2GPI
gaaauguacacccagaguaug

SEQ ID NO: 289 - RNA, 21 nt, Artificial Seqence
  siRNA sense strand against b2GPI
aaauguacacccagaguaugu

SEQ ID NO: 290 - RNA, 21 nt, Artificial Seqence
  siRNA sense strand against b2GPI
aauguacacccagaguauguc

SEQ ID NO: 291 - RNA, 21 nt, Artificial Seqence
  siRNA sense strand against b2GPI
auguacacccagaguaugucc

SEQ ID NO: 292 - RNA, 21 nt, Artificial Seqence
  siRNA sense strand against b2GPI
uguacacccagaguauguccu

SEQ ID NO: 293 - RNA, 21 nt, Artificial Seqence
  siRNA sense strand against b2GPI
guacacccagaguauguccuu

SEQ ID NO: 294 - RNA, 21 nt, Artificial Seqence
  siRNA sense strand against b2GPI
uacacccagaguauguccuuu

SEQ ID NO: 295 - RNA, 21 nt, Artificial Seqence
  siRNA sense strand against b2GPI
acacccagaguauguccuuuu

SEQ ID NO: 296 - RNA, 21 nt, Artificial Seqence
  siRNA sense strand against b2GPI
cacccagaguauguccuuuug

SEQ ID NO: 297 - RNA, 21 nt, Artificial Seqence
  siRNA sense strand against b2GPI
acccagaguauguccuuuugc

SEQ ID NO: 298 - RNA, 21 nt, Artificial Seqence
  siRNA sense strand against b2GPI
cccagaguauguccuuuugcu

SEQ ID NO: 299 - RNA, 21 nt, Artificial Seqence
  siRNA sense strand against b2GPI
ccagaguauguccuuuugcug

SEQ ID NO: 300 - RNA, 21 nt, Artificial Seqence
  siRNA sense strand against b2GPI
cagaguauguccuuuugcugg

SEQ ID NO: 301 - RNA, 21 nt, Artificial Seqence
  siRNA sense strand against b2GPI
agaguauguccuuuugcugga

SEQ ID NO: 302 - RNA, 21 nt, Artificial Seqence
  siRNA sense strand against b2GPI
gaguauguccuuuugcuggaa

SEQ ID NO: 303 - RNA, 21 nt, Artificial Seqence
  siRNA sense strand against b2GPI
aguauguccuuuugcuggaau

SEQ ID NO: 304 - RNA, 21 nt, Artificial Seqence
  siRNA sense strand against b2GPI
guauguccuuuugcuggaauc

SEQ ID NO: 305 - RNA, 21 nt, Artificial Seqence
  siRNA sense strand against b2GPI
uauguccuuuugcuggaaucu

SEQ ID NO: 306 - RNA, 21 nt, Artificial Seqence
  siRNA sense strand against b2GPI
auguccuuuugcuggaaucuu

SEQ ID NO: 307 - RNA, 21 nt, Artificial Seqence
  siRNA sense strand against b2GPI
uguccuuuugcuggaaucuua

SEQ ID NO: 308 - RNA, 21 nt, Artificial Seqence
  siRNA sense strand against b2GPI
guccuuuugcuggaaucuuag

SEQ ID NO: 309 - RNA, 21 nt, Artificial Seqence
  siRNA sense strand against b2GPI
uccuuuugcuggaaucuuaga

SEQ ID NO: 310 - RNA, 21 nt, Artificial Seqence
  siRNA sense strand against b2GPI
ccuuuugcuggaaucuuagaa

SEQ ID NO: 311 - RNA, 21 nt, Artificial Seqence
  siRNA sense strand against b2GPI
cuuuugcuggaaucuuagaaa

SEQ ID NO: 312 - RNA, 21 nt, Artificial Seqence
  siRNA sense strand against b2GPI
uuuugcuggaaucuuagaaaa

SEQ ID NO: 313 - RNA, 21 nt, Artificial Seqence
  siRNA sense strand against b2GPI
uuugcuggaaucuuagaaaau

SEQ ID NO: 314 - RNA, 21 nt, Artificial Seqence
  siRNA sense strand against b2GPI
uugcuggaaucuuagaaaaug

SEQ ID NO: 315 - RNA, 21 nt, Artificial Seqence
  siRNA sense strand against b2GPI
ugcuggaaucuuagaaaaugg

SEQ ID NO: 316 - RNA, 21 nt, Artificial Seqence
  siRNA sense strand against b2GPI
gcuggaaucuuagaaaaugga

SEQ ID NO: 317 - RNA, 21 nt, Artificial Seqence
  siRNA sense strand against b2GPI
cuggaaucuuagaaaauggag

SEQ ID NO: 318 - RNA, 21 nt, Artificial Seqence
  siRNA sense strand against b2GPI
uggaaucuuagaaaauggagc

SEQ ID NO: 319 - RNA, 21 nt, Artificial Seqence
  siRNA sense strand against b2GPI
ggaaucuuagaaaauggagcc

SEQ ID NO: 320 - RNA, 21 nt, Artificial Seqence
  siRNA sense strand against b2GPI
gaaucuuagaaaauggagccg

SEQ ID NO: 321 - RNA, 21 nt, Artificial Seqence
  siRNA sense strand against b2GPI
aaucuuagaaaauggagccgu

SEQ ID NO: 322 - RNA, 21 nt, Artificial Seqence
  siRNA sense strand against b2GPI
aucuuagaaaauggagccgua

SEQ ID NO: 323 - RNA, 21 nt, Artificial Seqence
  siRNA sense strand against b2GPI
ucuuagaaaauggagccguac

SEQ ID NO: 324 - RNA, 21 nt, Artificial Seqence
  siRNA sense strand against b2GPI
cuuagaaaauggagccguacg

SEQ ID NO: 325 - RNA, 21 nt, Artificial Seqence
  siRNA sense strand against b2GPI
uuagaaaauggagccguacgc

SEQ ID NO: 326 - RNA, 21 nt, Artificial Seqence
  siRNA sense strand against b2GPI
uagaaaauggagccguacgcu

SEQ ID NO: 327 - RNA, 21 nt, Artificial Seqence
  siRNA sense strand against b2GPI
agaaaauggagccguacgcua

SEQ ID NO: 328 - RNA, 21 nt, Artificial Seqence
  siRNA sense strand against b2GPI
gaaaauggagccguacgcuau

SEQ ID NO: 329 - RNA, 21 nt, Artificial Seqence
  siRNA sense strand against b2GPI
aaaauggagccguacgcuaua

SEQ ID NO: 330 - RNA, 21 nt, Artificial Seqence
  siRNA sense strand against b2GPI
aaauggagccguacgcuauac

SEQ ID NO: 331 - RNA, 21 nt, Artificial Seqence
  siRNA sense strand against b2GPI
aauggagccguacgcuauacg

SEQ ID NO: 332 - RNA, 21 nt, Artificial Seqence
  siRNA sense strand against b2GPI
auggagccguacgcuauacga

SEQ ID NO: 333 - RNA, 21 nt, Artificial Seqence
  siRNA sense strand against b2GPI
uggagccguacgcuauacgac

SEQ ID NO: 334 - RNA, 21 nt, Artificial Seqence
  siRNA sense strand against b2GPI
ggagccguacgcuauacgacu

SEQ ID NO: 335 - RNA, 21 nt, Artificial Seqence
  siRNA sense strand against b2GPI
gagccguacgcuauacgacuu

SEQ ID NO: 336 - RNA, 21 nt, Artificial Seqence
  siRNA sense strand against b2GPI
agccguacgcuauacgacuuu

SEQ ID NO: 337 - RNA, 21 nt, Artificial Seqence
  siRNA sense strand against b2GPI
gccguacgcuauacgacuuuu

SEQ ID NO: 338 - RNA, 21 nt, Artificial Seqence
  siRNA sense strand against b2GPI
ccguacgcuauacgacuuuug

SEQ ID NO: 339 - RNA, 21 nt, Artificial Seqence
  siRNA sense strand against b2GPI
cguacgcuauacgacuuuuga

SEQ ID NO: 340 - RNA, 21 nt, Artificial Seqence
  siRNA sense strand against b2GPI
guacgcuauacgacuuuugaa

SEQ ID NO: 341 - RNA, 21 nt, Artificial Seqence
  siRNA sense strand against b2GPI
uacgcuauacgacuuuugaau

SEQ ID NO: 342 - RNA, 21 nt, Artificial Seqence
  siRNA sense strand against b2GPI
acgcuauacgacuuuugaaua

SEQ ID NO: 343 - RNA, 21 nt, Artificial Seqence
  siRNA sense strand against b2GPI
cgcuauacgacuuuugaauau

SEQ ID NO: 344 - RNA, 21 nt, Artificial Seqence
  siRNA sense strand against b2GPI
gcuauacgacuuuugaauauc

SEQ ID NO: 345 - RNA, 21 nt, Artificial Seqence
  siRNA sense strand against b2GPI
cuauacgacuuuugaauaucc

SEQ ID NO: 346 - RNA, 21 nt, Artificial Seqence
  siRNA sense strand against b2GPI
uauacgacuuuugaauauccc

SEQ ID NO: 347 - RNA, 21 nt, Artificial Seqence
  siRNA sense strand against b2GPI
auacgacuuuugaauauccca

SEQ ID NO: 348 - RNA, 21 nt, Artificial Seqence
  siRNA sense strand against b2GPI
uacgacuuuugaauaucccaa

SEQ ID NO: 349 - RNA, 21 nt, Artificial Seqence
  siRNA sense strand against b2GPI
acgacuuuugaauaucccaac

SEQ ID NO: 350 - RNA, 21 nt, Artificial Seqence
  siRNA sense strand against b2GPI
cgacuuuugaauaucccaaca

SEQ ID NO: 351 - RNA, 21 nt, Artificial Seqence
  siRNA sense strand against b2GPI
gacuuuugaauaucccaacac

SEQ ID NO: 352 - RNA, 21 nt, Artificial Seqence
  siRNA sense strand against b2GPI
acuuuugaauaucccaacacg

SEQ ID NO: 353 - RNA, 21 nt, Artificial Seqence
  siRNA sense strand against b2GPI
cuuuugaauaucccaacacga

SEQ ID NO: 354 - RNA, 21 nt, Artificial Seqence
  siRNA sense strand against b2GPI
uuuugaauaucccaacacgau

SEQ ID NO: 355 - RNA, 21 nt, Artificial Seqence
  siRNA sense strand against b2GPI
uuugaauaucccaacacgauc

SEQ ID NO: 356 - RNA, 21 nt, Artificial Seqence
  siRNA sense strand against b2GPI
uugaauaucccaacacgauca

SEQ ID NO: 357 - RNA, 21 nt, Artificial Seqence
  siRNA sense strand against b2GPI
ugaauaucccaacacgaucag

SEQ ID NO: 358 - RNA, 21 nt, Artificial Seqence
  siRNA sense strand against b2GPI
gaauaucccaacacgaucagu

SEQ ID NO: 359 - RNA, 21 nt, Artificial Seqence
  siRNA sense strand against b2GPI
aauaucccaacacgaucaguu

SEQ ID NO: 360 - RNA, 21 nt, Artificial Seqence
  siRNA sense strand against b2GPI
auaucccaacacgaucaguuu

SEQ ID NO: 361 - RNA, 21 nt, Artificial Seqence
  siRNA sense strand against b2GPI
uaucccaacacgaucaguuuu

SEQ ID NO: 362 - RNA, 21 nt, Artificial Seqence
  siRNA sense strand against b2GPI
aucccaacacgaucaguuuuu

SEQ ID NO: 363 - RNA, 21 nt, Artificial Seqence
  siRNA sense strand against b2GPI
ucccaacacgaucaguuuuuc

SEQ ID NO: 364 - RNA, 21 nt, Artificial Seqence
  siRNA sense strand against b2GPI
cccaacacgaucaguuuuucu

SEQ ID NO: 365 - RNA, 21 nt, Artificial Seqence
  siRNA sense strand against b2GPI
ccaacacgaucaguuuuucuu

SEQ ID NO: 366 - RNA, 21 nt, Artificial Seqence
  siRNA sense strand against b2GPI
caacacgaucaguuuuucuug

SEQ ID NO: 367 - RNA, 21 nt, Artificial Seqence
  siRNA sense strand against b2GPI
aacacgaucaguuuuucuugu

SEQ ID NO: 368 - RNA, 21 nt, Artificial Seqence
  siRNA sense strand against b2GPI
acacgaucaguuuuucuugua

SEQ ID NO: 369 - RNA, 21 nt, Artificial Seqence
  siRNA sense strand against b2GPI
cacgaucaguuuuucuuguaa

SEQ ID NO: 370 - RNA, 21 nt, Artificial Seqence
  siRNA sense strand against b2GPI
acgaucaguuuuucuuguaac

SEQ ID NO: 371 - RNA, 21 nt, Artificial Seqence
  siRNA sense strand against b2GPI
cgaucaguuuuucuuguaaca

SEQ ID NO: 372 - RNA, 21 nt, Artificial Seqence
  siRNA sense strand against b2GPI
gaucaguuuuucuuguaacac

SEQ ID NO: 373 - RNA, 21 nt, Artificial Seqence
  siRNA sense strand against b2GPI
aucaguuuuucuuguaacacu

SEQ ID NO: 374 - RNA, 21 nt, Artificial Seqence
  siRNA sense strand against b2GPI
ucaguuuuucuuguaacacug

SEQ ID NO: 375 - RNA, 21 nt, Artificial Seqence
  siRNA sense strand against b2GPI
caguuuuucuuguaacacugg

SEQ ID NO: 376 - RNA, 21 nt, Artificial Seqence
  siRNA sense strand against b2GPI
aguuuuucuuguaacacuggg

SEQ ID NO: 377 - RNA, 21 nt, Artificial Seqence
  siRNA sense strand against b2GPI
guuuuucuuguaacacugggu

SEQ ID NO: 378 - RNA, 21 nt, Artificial Seqence
  siRNA sense strand against b2GPI
uuuuucuuguaacacuggguu

SEQ ID NO: 379 - RNA, 21 nt, Artificial Seqence
  siRNA sense strand against b2GPI
uuuucuuguaacacuggguuu

SEQ ID NO: 380 - RNA, 21 nt, Artificial Seqence
  siRNA sense strand against b2GPI
uuucuuguaacacuggguuuu

SEQ ID NO: 381 - RNA, 21 nt, Artificial Seqence
  siRNA sense strand against b2GPI
uucuuguaacacuggguuuua

SEQ ID NO: 382 - RNA, 21 nt, Artificial Seqence
  siRNA sense strand against b2GPI
ucuuguaacacuggguuuuau

SEQ ID NO: 383 - RNA, 21 nt, Artificial Seqence
  siRNA sense strand against b2GPI
cuuguaacacuggguuuuauc

SEQ ID NO: 384 - RNA, 21 nt, Artificial Seqence
  siRNA sense strand against b2GPI
uuguaacacuggguuuuaucu

SEQ ID NO: 385 - RNA, 21 nt, Artificial Seqence
  siRNA sense strand against b2GPI
uguaacacuggguuuuaucug

SEQ ID NO: 386 - RNA, 21 nt, Artificial Seqence
  siRNA sense strand against b2GPI
guaacacuggguuuuaucuga

SEQ ID NO: 387 - RNA, 21 nt, Artificial Seqence
  siRNA sense strand against b2GPI
uaacacuggguuuuaucugaa

SEQ ID NO: 388 - RNA, 21 nt, Artificial Seqence
  siRNA sense strand against b2GPI
aacacuggguuuuaucugaau

SEQ ID NO: 389 - RNA, 21 nt, Artificial Seqence
  siRNA sense strand against b2GPI
acacuggguuuuaucugaaug

SEQ ID NO: 390 - RNA, 21 nt, Artificial Seqence
  siRNA sense strand against b2GPI
cacuggguuuuaucugaaugg

SEQ ID NO: 391 - RNA, 21 nt, Artificial Seqence
  siRNA sense strand against b2GPI
acuggguuuuaucugaauggc

SEQ ID NO: 392 - RNA, 21 nt, Artificial Seqence
  siRNA sense strand against b2GPI
cuggguuuuaucugaauggcg

SEQ ID NO: 393 - RNA, 21 nt, Artificial Seqence
  siRNA sense strand against b2GPI
uggguuuuaucugaauggcgc

SEQ ID NO: 394 - RNA, 21 nt, Artificial Seqence
  siRNA sense strand against b2GPI
ggguuuuaucugaauggcgcu

SEQ ID NO: 395 - RNA, 21 nt, Artificial Seqence
  siRNA sense strand against b2GPI
gguuuuaucugaauggcgcug

SEQ ID NO: 396 - RNA, 21 nt, Artificial Seqence
  siRNA sense strand against b2GPI
guuuuaucugaauggcgcuga

SEQ ID NO: 397 - RNA, 21 nt, Artificial Seqence
  siRNA sense strand against b2GPI
uuuuaucugaauggcgcugau

SEQ ID NO: 398 - RNA, 21 nt, Artificial Seqence
  siRNA sense strand against b2GPI
uuuaucugaauggcgcugauu

SEQ ID NO: 399 - RNA, 21 nt, Artificial Seqence
  siRNA sense strand against b2GPI
uuaucugaauggcgcugauuc

SEQ ID NO: 400 - RNA, 21 nt, Artificial Seqence
  siRNA sense strand against b2GPI
uaucugaauggcgcugauucu

SEQ ID NO: 401 - RNA, 21 nt, Artificial Seqence
  siRNA sense strand against b2GPI
aucugaauggcgcugauucug

SEQ ID NO: 402 - RNA, 21 nt, Artificial Seqence
  siRNA sense strand against b2GPI
ucugaauggcgcugauucugc

SEQ ID NO: 403 - RNA, 21 nt, Artificial Seqence
  siRNA sense strand against b2GPI
cugaauggcgcugauucugcc

SEQ ID NO: 404 - RNA, 21 nt, Artificial Seqence
  siRNA sense strand against b2GPI
ugaauggcgcugauucugcca

SEQ ID NO: 405 - RNA, 21 nt, Artificial Seqence
  siRNA sense strand against b2GPI
gaauggcgcugauucugccaa

SEQ ID NO: 406 - RNA, 21 nt, Artificial Seqence
  siRNA sense strand against b2GPI
aauggcgcugauucugccaag

SEQ ID NO: 407 - RNA, 21 nt, Artificial Seqence
  siRNA sense strand against b2GPI
auggcgcugauucugccaagu

SEQ ID NO: 408 - RNA, 21 nt, Artificial Seqence
  siRNA sense strand against b2GPI
uggcgcugauucugccaagug

SEQ ID NO: 409 - RNA, 21 nt, Artificial Seqence
  siRNA sense strand against b2GPI
ggcgcugauucugccaagugc

SEQ ID NO: 410 - RNA, 21 nt, Artificial Seqence
  siRNA sense strand against b2GPI
gcgcugauucugccaagugca

SEQ ID NO: 411 - RNA, 21 nt, Artificial Seqence
  siRNA sense strand against b2GPI
cgcugauucugccaagugcac

SEQ ID NO: 412 - RNA, 21 nt, Artificial Seqence
  siRNA sense strand against b2GPI
gcugauucugccaagugcacu

SEQ ID NO: 413 - RNA, 21 nt, Artificial Seqence
  siRNA sense strand against b2GPI
cugauucugccaagugcacug

SEQ ID NO: 414 - RNA, 21 nt, Artificial Seqence
  siRNA sense strand against b2GPI
ugauucugccaagugcacuga

SEQ ID NO: 415 - RNA, 21 nt, Artificial Seqence
  siRNA sense strand against b2GPI
gauucugccaagugcacugag

SEQ ID NO: 416 - RNA, 21 nt, Artificial Seqence
  siRNA sense strand against b2GPI
auucugccaagugcacugagg

SEQ ID NO: 417 - RNA, 21 nt, Artificial Seqence
  siRNA sense strand against b2GPI
uucugccaagugcacugagga

SEQ ID NO: 418 - RNA, 21 nt, Artificial Seqence
  siRNA sense strand against b2GPI
ucugccaagugcacugaggaa

SEQ ID NO: 419 - RNA, 21 nt, Artificial Seqence
  siRNA sense strand against b2GPI
cugccaagugcacugaggaag

SEQ ID NO: 420 - RNA, 21 nt, Artificial Seqence
  siRNA sense strand against b2GPI
ugccaagugcacugaggaagg

SEQ ID NO: 421 - RNA, 21 nt, Artificial Seqence
  siRNA sense strand against b2GPI
gccaagugcacugaggaagga

SEQ ID NO: 422 - RNA, 21 nt, Artificial Seqence
  siRNA sense strand against b2GPI
ccaagugcacugaggaaggaa

SEQ ID NO: 423 - RNA, 21 nt, Artificial Seqence
  siRNA sense strand against b2GPI
caagugcacugaggaaggaaa

SEQ ID NO: 424 - RNA, 21 nt, Artificial Seqence
  siRNA sense strand against b2GPI
aagugcacugaggaaggaaaa

SEQ ID NO: 425 - RNA, 21 nt, Artificial Seqence
  siRNA sense strand against b2GPI
agugcacugaggaaggaaaau

SEQ ID NO: 426 - RNA, 21 nt, Artificial Seqence
  siRNA sense strand against b2GPI
gugcacugaggaaggaaaaug

SEQ ID NO: 427 - RNA, 21 nt, Artificial Seqence
  siRNA sense strand against b2GPI
ugcacugaggaaggaaaaugg

SEQ ID NO: 428 - RNA, 21 nt, Artificial Seqence
  siRNA sense strand against b2GPI
gcacugaggaaggaaaaugga

SEQ ID NO: 429 - RNA, 21 nt, Artificial Seqence
  siRNA sense strand against b2GPI
cacugaggaaggaaaauggag

SEQ ID NO: 430 - RNA, 21 nt, Artificial Seqence
  siRNA sense strand against b2GPI
acugaggaaggaaaauggagc

SEQ ID NO: 431 - RNA, 21 nt, Artificial Seqence
  siRNA sense strand against b2GPI
cugaggaaggaaaauggagcc

SEQ ID NO: 432 - RNA, 21 nt, Artificial Seqence
  siRNA sense strand against b2GPI
ugaggaaggaaaauggagccc

SEQ ID NO: 433 - RNA, 21 nt, Artificial Seqence
  siRNA sense strand against b2GPI
gaggaaggaaaauggagcccg

SEQ ID NO: 434 - RNA, 21 nt, Artificial Seqence
  siRNA sense strand against b2GPI
aggaaggaaaauggagcccgg

SEQ ID NO: 435 - RNA, 21 nt, Artificial Seqence
  siRNA sense strand against b2GPI
ggaaggaaaauggagcccgga

SEQ ID NO: 436 - RNA, 21 nt, Artificial Seqence
  siRNA sense strand against b2GPI
gaaggaaaauggagcccggag

SEQ ID NO: 437 - RNA, 21 nt, Artificial Seqence
  siRNA sense strand against b2GPI
aaggaaaauggagcccggagc

SEQ ID NO: 438 - RNA, 21 nt, Artificial Seqence
  siRNA sense strand against b2GPI
aggaaaauggagcccggagcu

SEQ ID NO: 439 - RNA, 21 nt, Artificial Seqence
  siRNA sense strand against b2GPI
ggaaaauggagcccggagcuu

SEQ ID NO: 440 - RNA, 21 nt, Artificial Seqence
  siRNA sense strand against b2GPI
gaaaauggagcccggagcuuc

SEQ ID NO: 441 - RNA, 21 nt, Artificial Seqence
  siRNA sense strand against b2GPI
aaaauggagcccggagcuucc

SEQ ID NO: 442 - RNA, 21 nt, Artificial Seqence
  siRNA sense strand against b2GPI
aaauggagcccggagcuuccu

SEQ ID NO: 443 - RNA, 21 nt, Artificial Seqence
  siRNA sense strand against b2GPI
aauggagcccggagcuuccug

SEQ ID NO: 444 - RNA, 21 nt, Artificial Seqence
  siRNA sense strand against b2GPI
auggagcccggagcuuccugu

SEQ ID NO: 445 - RNA, 21 nt, Artificial Seqence
  siRNA sense strand against b2GPI
uggagcccggagcuuccuguc

SEQ ID NO: 446 - RNA, 21 nt, Artificial Seqence
  siRNA sense strand against b2GPI
ggagcccggagcuuccugucu

SEQ ID NO: 447 - RNA, 21 nt, Artificial Seqence
  siRNA sense strand against b2GPI
gagcccggagcuuccugucug

SEQ ID NO: 448 - RNA, 21 nt, Artificial Seqence
  siRNA sense strand against b2GPI
agcccggagcuuccugucugu

SEQ ID NO: 449 - RNA, 21 nt, Artificial Seqence
  siRNA sense strand against b2GPI
gcccggagcuuccugucugug

SEQ ID NO: 450 - RNA, 21 nt, Artificial Seqence
  siRNA sense strand against b2GPI
cccggagcuuccugucugugc

SEQ ID NO: 451 - RNA, 21 nt, Artificial Seqence
  siRNA sense strand against b2GPI
ccggagcuuccugucugugcu

SEQ ID NO: 452 - RNA, 21 nt, Artificial Seqence
  siRNA sense strand against b2GPI
cggagcuuccugucugugcuc

SEQ ID NO: 453 - RNA, 21 nt, Artificial Seqence
  siRNA sense strand against b2GPI
ggagcuuccugucugugcucc

SEQ ID NO: 454 - RNA, 21 nt, Artificial Seqence
  siRNA sense strand against b2GPI
gagcuuccugucugugcuccc

SEQ ID NO: 455 - RNA, 21 nt, Artificial Seqence
  siRNA sense strand against b2GPI
agcuuccugucugugcuccca

SEQ ID NO: 456 - RNA, 21 nt, Artificial Seqence
  siRNA sense strand against b2GPI
gcuuccugucugugcucccau

SEQ ID NO: 457 - RNA, 21 nt, Artificial Seqence
  siRNA sense strand against b2GPI
cuuccugucugugcucccauc

SEQ ID NO: 458 - RNA, 21 nt, Artificial Seqence
  siRNA sense strand against b2GPI
uuccugucugugcucccauca

SEQ ID NO: 459 - RNA, 21 nt, Artificial Seqence
  siRNA sense strand against b2GPI
uccugucugugcucccaucau

SEQ ID NO: 460 - RNA, 21 nt, Artificial Seqence
  siRNA sense strand against b2GPI
ccugucugugcucccaucauc

SEQ ID NO: 461 - RNA, 21 nt, Artificial Seqence
  siRNA sense strand against b2GPI
cugucugugcucccaucaucu

SEQ ID NO: 462 - RNA, 21 nt, Artificial Seqence
  siRNA sense strand against b2GPI
ugucugugcucccaucaucug

SEQ ID NO: 463 - RNA, 21 nt, Artificial Seqence
  siRNA sense strand against b2GPI
gucugugcucccaucaucugc

SEQ ID NO: 464 - RNA, 21 nt, Artificial Seqence
  siRNA sense strand against b2GPI
ucugugcucccaucaucugcc

SEQ ID NO: 465 - RNA, 21 nt, Artificial Seqence
  siRNA sense strand against b2GPI
cugugcucccaucaucugccc

SEQ ID NO: 466 - RNA, 21 nt, Artificial Seqence
  siRNA sense strand against b2GPI
ugugcucccaucaucugcccu

SEQ ID NO: 467 - RNA, 21 nt, Artificial Seqence
  siRNA sense strand against b2GPI
gugcucccaucaucugcccuc

SEQ ID NO: 468 - RNA, 21 nt, Artificial Seqence
  siRNA sense strand against b2GPI
ugcucccaucaucugcccucc

SEQ ID NO: 469 - RNA, 21 nt, Artificial Seqence
  siRNA sense strand against b2GPI
gcucccaucaucugcccucca

SEQ ID NO: 470 - RNA, 21 nt, Artificial Seqence
  siRNA sense strand against b2GPI
cucccaucaucugcccuccac

SEQ ID NO: 471 - RNA, 21 nt, Artificial Seqence
  siRNA sense strand against b2GPI
ucccaucaucugcccuccacc

SEQ ID NO: 472 - RNA, 21 nt, Artificial Seqence
  siRNA sense strand against b2GPI
cccaucaucugcccuccacca

SEQ ID NO: 473 - RNA, 21 nt, Artificial Seqence
  siRNA sense strand against b2GPI
ccaucaucugcccuccaccau

SEQ ID NO: 474 - RNA, 21 nt, Artificial Seqence
  siRNA sense strand against b2GPI
caucaucugcccuccaccauc

SEQ ID NO: 475 - RNA, 21 nt, Artificial Seqence
  siRNA sense strand against b2GPI
aucaucugcccuccaccaucc

SEQ ID NO: 476 - RNA, 21 nt, Artificial Seqence
  siRNA sense strand against b2GPI
ucaucugcccuccaccaucca

SEQ ID NO: 477 - RNA, 21 nt, Artificial Seqence
  siRNA sense strand against b2GPI
caucugcccuccaccauccau

SEQ ID NO: 478 - RNA, 21 nt, Artificial Seqence
  siRNA sense strand against b2GPI
aucugcccuccaccauccaua

SEQ ID NO: 479 - RNA, 21 nt, Artificial Seqence
  siRNA sense strand against b2GPI
ucugcccuccaccauccauac

SEQ ID NO: 480 - RNA, 21 nt, Artificial Seqence
  siRNA sense strand against b2GPI
cugcccuccaccauccauacc

SEQ ID NO: 481 - RNA, 21 nt, Artificial Seqence
  siRNA sense strand against b2GPI
ugcccuccaccauccauaccu

SEQ ID NO: 482 - RNA, 21 nt, Artificial Seqence
  siRNA sense strand against b2GPI
gcccuccaccauccauaccua

SEQ ID NO: 483 - RNA, 21 nt, Artificial Seqence
  siRNA sense strand against b2GPI
cccuccaccauccauaccuac

SEQ ID NO: 484 - RNA, 21 nt, Artificial Seqence
  siRNA sense strand against b2GPI
ccuccaccauccauaccuacg

SEQ ID NO: 485 - RNA, 21 nt, Artificial Seqence
  siRNA sense strand against b2GPI
cuccaccauccauaccuacgu

SEQ ID NO: 486 - RNA, 21 nt, Artificial Seqence
  siRNA sense strand against b2GPI
uccaccauccauaccuacguu

SEQ ID NO: 487 - RNA, 21 nt, Artificial Seqence
  siRNA sense strand against b2GPI
ccaccauccauaccuacguuu

SEQ ID NO: 488 - RNA, 21 nt, Artificial Seqence
  siRNA sense strand against b2GPI
caccauccauaccuacguuug

SEQ ID NO: 489 - RNA, 21 nt, Artificial Seqence
  siRNA sense strand against b2GPI
accauccauaccuacguuugc

SEQ ID NO: 490 - RNA, 21 nt, Artificial Seqence
  siRNA sense strand against b2GPI
ccauccauaccuacguuugca

SEQ ID NO: 491 - RNA, 21 nt, Artificial Seqence
  siRNA sense strand against b2GPI
cauccauaccuacguuugcaa

SEQ ID NO: 492 - RNA, 21 nt, Artificial Seqence
  siRNA sense strand against b2GPI
auccauaccuacguuugcaac

SEQ ID NO: 493 - RNA, 21 nt, Artificial Seqence
  siRNA sense strand against b2GPI
uccauaccuacguuugcaaca

SEQ ID NO: 494 - RNA, 21 nt, Artificial Seqence
  siRNA sense strand against b2GPI
ccauaccuacguuugcaacac

SEQ ID NO: 495 - RNA, 21 nt, Artificial Seqence
  siRNA sense strand against b2GPI
cauaccuacguuugcaacacu

SEQ ID NO: 496 - RNA, 21 nt, Artificial Seqence
  siRNA sense strand against b2GPI
auaccuacguuugcaacacuu

SEQ ID NO: 497 - RNA, 21 nt, Artificial Seqence
  siRNA sense strand against b2GPI
uaccuacguuugcaacacuuc

SEQ ID NO: 498 - RNA, 21 nt, Artificial Seqence
  siRNA sense strand against b2GPI
accuacguuugcaacacuucg

SEQ ID NO: 499 - RNA, 21 nt, Artificial Seqence
  siRNA sense strand against b2GPI
ccuacguuugcaacacuucgu

SEQ ID NO: 500 - RNA, 21 nt, Artificial Seqence
  siRNA sense strand against b2GPI
cuacguuugcaacacuucgug

SEQ ID NO: 501 - RNA, 21 nt, Artificial Seqence
  siRNA sense strand against b2GPI
uacguuugcaacacuucgugu

SEQ ID NO: 502 - RNA, 21 nt, Artificial Seqence
  siRNA sense strand against b2GPI
acguuugcaacacuucguguu

SEQ ID NO: 503 - RNA, 21 nt, Artificial Seqence
  siRNA sense strand against b2GPI
cguuugcaacacuucguguuu

SEQ ID NO: 504 - RNA, 21 nt, Artificial Seqence
  siRNA sense strand against b2GPI
guuugcaacacuucguguuua

SEQ ID NO: 505 - RNA, 21 nt, Artificial Seqence
  siRNA sense strand against b2GPI
uuugcaacacuucguguuuau

SEQ ID NO: 506 - RNA, 21 nt, Artificial Seqence
  siRNA sense strand against b2GPI
uugcaacacuucguguuuaua

SEQ ID NO: 507 - RNA, 21 nt, Artificial Seqence
  siRNA sense strand against b2GPI
ugcaacacuucguguuuauaa

SEQ ID NO: 508 - RNA, 21 nt, Artificial Seqence
  siRNA sense strand against b2GPI
gcaacacuucguguuuauaag

SEQ ID NO: 509 - RNA, 21 nt, Artificial Seqence
  siRNA sense strand against b2GPI
caacacuucguguuuauaagc

SEQ ID NO: 510 - RNA, 21 nt, Artificial Seqence
  siRNA sense strand against b2GPI
aacacuucguguuuauaagcc

SEQ ID NO: 511 - RNA, 21 nt, Artificial Seqence
  siRNA sense strand against b2GPI
acacuucguguuuauaagcca

SEQ ID NO: 512 - RNA, 21 nt, Artificial Seqence
  siRNA sense strand against b2GPI
cacuucguguuuauaagccau

SEQ ID NO: 513 - RNA, 21 nt, Artificial Seqence
  siRNA sense strand against b2GPI
acuucguguuuauaagccauc

SEQ ID NO: 514 - RNA, 21 nt, Artificial Seqence
  siRNA sense strand against b2GPI
cuucguguuuauaagccauca

SEQ ID NO: 515 - RNA, 21 nt, Artificial Seqence
  siRNA sense strand against b2GPI
uucguguuuauaagccaucag

SEQ ID NO: 516 - RNA, 21 nt, Artificial Seqence
  siRNA sense strand against b2GPI
ucguguuuauaagccaucagc

SEQ ID NO: 517 - RNA, 21 nt, Artificial Seqence
  siRNA sense strand against b2GPI
cguguuuauaagccaucagcu

SEQ ID NO: 518 - RNA, 21 nt, Artificial Seqence
  siRNA sense strand against b2GPI
guguuuauaagccaucagcug

SEQ ID NO: 519 - RNA, 21 nt, Artificial Seqence
  siRNA sense strand against b2GPI
uguuuauaagccaucagcugg

SEQ ID NO: 520 - RNA, 21 nt, Artificial Seqence
  siRNA sense strand against b2GPI
guuuauaagccaucagcugga

SEQ ID NO: 521 - RNA, 21 nt, Artificial Seqence
  siRNA sense strand against b2GPI
uuuauaagccaucagcuggaa

SEQ ID NO: 522 - RNA, 21 nt, Artificial Seqence
  siRNA sense strand against b2GPI
uuauaagccaucagcuggaaa

SEQ ID NO: 523 - RNA, 21 nt, Artificial Seqence
  siRNA sense strand against b2GPI
uauaagccaucagcuggaaac

SEQ ID NO: 524 - RNA, 21 nt, Artificial Seqence
  siRNA sense strand against b2GPI
auaagccaucagcuggaaaca

SEQ ID NO: 525 - RNA, 21 nt, Artificial Seqence
  siRNA sense strand against b2GPI
uaagccaucagcuggaaacaa

SEQ ID NO: 526 - RNA, 21 nt, Artificial Seqence
  siRNA sense strand against b2GPI
aagccaucagcuggaaacaau

SEQ ID NO: 527 - RNA, 21 nt, Artificial Seqence
  siRNA sense strand against b2GPI
agccaucagcuggaaacaauu

SEQ ID NO: 528 - RNA, 21 nt, Artificial Seqence
  siRNA sense strand against b2GPI
gccaucagcuggaaacaauuc

SEQ ID NO: 529 - RNA, 21 nt, Artificial Seqence
  siRNA sense strand against b2GPI
ccaucagcuggaaacaauucc

SEQ ID NO: 530 - RNA, 21 nt, Artificial Seqence
  siRNA sense strand against b2GPI
caucagcuggaaacaauuccc

SEQ ID NO: 531 - RNA, 21 nt, Artificial Seqence
  siRNA sense strand against b2GPI
aucagcuggaaacaauucccu

SEQ ID NO: 532 - RNA, 21 nt, Artificial Seqence
  siRNA sense strand against b2GPI
ucagcuggaaacaauucccuc

SEQ ID NO: 533 - RNA, 21 nt, Artificial Seqence
  siRNA sense strand against b2GPI
cagcuggaaacaauucccucu

SEQ ID NO: 534 - RNA, 21 nt, Artificial Seqence
  siRNA sense strand against b2GPI
agcuggaaacaauucccucua

SEQ ID NO: 535 - RNA, 21 nt, Artificial Seqence
  siRNA sense strand against b2GPI
gcuggaaacaauucccucuau

SEQ ID NO: 536 - RNA, 21 nt, Artificial Seqence
  siRNA sense strand against b2GPI
cuggaaacaauucccucuauc

SEQ ID NO: 537 - RNA, 21 nt, Artificial Seqence
  siRNA sense strand against b2GPI
uggaaacaauucccucuaucg

SEQ ID NO: 538 - RNA, 21 nt, Artificial Seqence
  siRNA sense strand against b2GPI
ggaaacaauucccucuaucgg

SEQ ID NO: 539 - RNA, 21 nt, Artificial Seqence
  siRNA sense strand against b2GPI
gaaacaauucccucuaucggg

SEQ ID NO: 540 - RNA, 21 nt, Artificial Seqence
  siRNA sense strand against b2GPI
aaacaauucccucuaucggga

SEQ ID NO: 541 - RNA, 21 nt, Artificial Seqence
  siRNA sense strand against b2GPI
aacaauucccucuaucgggac

SEQ ID NO: 542 - RNA, 21 nt, Artificial Seqence
  siRNA sense strand against b2GPI
acaauucccucuaucgggaca

SEQ ID NO: 543 - RNA, 21 nt, Artificial Seqence
  siRNA sense strand against b2GPI
caauucccucuaucgggacac

SEQ ID NO: 544 - RNA, 21 nt, Artificial Seqence
  siRNA sense strand against b2GPI
aauucccucuaucgggacaca

SEQ ID NO: 545 - RNA, 21 nt, Artificial Seqence
  siRNA sense strand against b2GPI
auucccucuaucgggacacag

SEQ ID NO: 546 - RNA, 21 nt, Artificial Seqence
  siRNA sense strand against b2GPI
uucccucuaucgggacacagc

SEQ ID NO: 547 - RNA, 21 nt, Artificial Seqence
  siRNA sense strand against b2GPI
ucccucuaucgggacacagca

SEQ ID NO: 548 - RNA, 21 nt, Artificial Seqence
  siRNA sense strand against b2GPI
cccucuaucgggacacagcag

SEQ ID NO: 549 - RNA, 21 nt, Artificial Seqence
  siRNA sense strand against b2GPI
ccucuaucgggacacagcagu

SEQ ID NO: 550 - RNA, 21 nt, Artificial Seqence
  siRNA sense strand against b2GPI
cucuaucgggacacagcaguu

SEQ ID NO: 551 - RNA, 21 nt, Artificial Seqence
  siRNA sense strand against b2GPI
ucuaucgggacacagcaguuu

SEQ ID NO: 552 - RNA, 21 nt, Artificial Seqence
  siRNA sense strand against b2GPI
cuaucgggacacagcaguuuu

SEQ ID NO: 553 - RNA, 21 nt, Artificial Seqence
  siRNA sense strand against b2GPI
uaucgggacacagcaguuuuu

SEQ ID NO: 554 - RNA, 21 nt, Artificial Seqence
  siRNA sense strand against b2GPI
aucgggacacagcaguuuuug

SEQ ID NO: 555 - RNA, 21 nt, Artificial Seqence
  siRNA sense strand against b2GPI
ucgggacacagcaguuuuuga

SEQ ID NO: 556 - RNA, 21 nt, Artificial Seqence
  siRNA sense strand against b2GPI
cgggacacagcaguuuuugaa

SEQ ID NO: 557 - RNA, 21 nt, Artificial Seqence
  siRNA sense strand against b2GPI
gggacacagcaguuuuugaau

SEQ ID NO: 558 - RNA, 21 nt, Artificial Seqence
  siRNA sense strand against b2GPI
ggacacagcaguuuuugaaug

SEQ ID NO: 559 - RNA, 21 nt, Artificial Seqence
  siRNA sense strand against b2GPI
gacacagcaguuuuugaaugu

SEQ ID NO: 560 - RNA, 21 nt, Artificial Seqence
  siRNA sense strand against b2GPI
acacagcaguuuuugaauguu

SEQ ID NO: 561 - RNA, 21 nt, Artificial Seqence
  siRNA sense strand against b2GPI
cacagcaguuuuugaauguuu

SEQ ID NO: 562 - RNA, 21 nt, Artificial Seqence
  siRNA sense strand against b2GPI
acagcaguuuuugaauguuug

SEQ ID NO: 563 - RNA, 21 nt, Artificial Seqence
  siRNA sense strand against b2GPI
cagcaguuuuugaauguuugc

SEQ ID NO: 564 - RNA, 21 nt, Artificial Seqence
  siRNA sense strand against b2GPI
agcaguuuuugaauguuugcc

SEQ ID NO: 565 - RNA, 21 nt, Artificial Seqence
  siRNA sense strand against b2GPI
gcaguuuuugaauguuugcca

SEQ ID NO: 566 - RNA, 21 nt, Artificial Seqence
  siRNA sense strand against b2GPI
caguuuuugaauguuugccac

SEQ ID NO: 567 - RNA, 21 nt, Artificial Seqence
  siRNA sense strand against b2GPI
aguuuuugaauguuugccaca

SEQ ID NO: 568 - RNA, 21 nt, Artificial Seqence
  siRNA sense strand against b2GPI
guuuuugaauguuugccacaa

SEQ ID NO: 569 - RNA, 21 nt, Artificial Seqence
  siRNA sense strand against b2GPI
uuuuugaauguuugccacaac

SEQ ID NO: 570 - RNA, 21 nt, Artificial Seqence
  siRNA sense strand against b2GPI
uuuugaauguuugccacaaca

SEQ ID NO: 571 - RNA, 21 nt, Artificial Seqence
  siRNA sense strand against b2GPI
uuugaauguuugccacaacau

SEQ ID NO: 572 - RNA, 21 nt, Artificial Seqence
  siRNA sense strand against b2GPI
uugaauguuugccacaacaug

SEQ ID NO: 573 - RNA, 21 nt, Artificial Seqence
  siRNA sense strand against b2GPI
ugaauguuugccacaacaugc

SEQ ID NO: 574 - RNA, 21 nt, Artificial Seqence
  siRNA sense strand against b2GPI
gaauguuugccacaacaugcg

SEQ ID NO: 575 - RNA, 21 nt, Artificial Seqence
  siRNA sense strand against b2GPI
aauguuugccacaacaugcga

SEQ ID NO: 576 - RNA, 21 nt, Artificial Seqence
  siRNA sense strand against b2GPI
auguuugccacaacaugcgau

SEQ ID NO: 577 - RNA, 21 nt, Artificial Seqence
  siRNA sense strand against b2GPI
uguuugccacaacaugcgaug

SEQ ID NO: 578 - RNA, 21 nt, Artificial Seqence
  siRNA sense strand against b2GPI
guuugccacaacaugcgaugu

SEQ ID NO: 579 - RNA, 21 nt, Artificial Seqence
  siRNA sense strand against b2GPI
uuugccacaacaugcgauguu

SEQ ID NO: 580 - RNA, 21 nt, Artificial Seqence
  siRNA sense strand against b2GPI
uugccacaacaugcgauguuu

SEQ ID NO: 581 - RNA, 21 nt, Artificial Seqence
  siRNA sense strand against b2GPI
ugccacaacaugcgauguuug

SEQ ID NO: 582 - RNA, 21 nt, Artificial Seqence
  siRNA sense strand against b2GPI
gccacaacaugcgauguuugg

SEQ ID NO: 583 - RNA, 21 nt, Artificial Seqence
  siRNA sense strand against b2GPI
ccacaacaugcgauguuugga

SEQ ID NO: 584 - RNA, 21 nt, Artificial Seqence
  siRNA sense strand against b2GPI
cacaacaugcgauguuuggaa

SEQ ID NO: 585 - RNA, 21 nt, Artificial Seqence
  siRNA sense strand against b2GPI
acaacaugcgauguuuggaaa

SEQ ID NO: 586 - RNA, 21 nt, Artificial Seqence
  siRNA sense strand against b2GPI
caacaugcgauguuuggaaau

SEQ ID NO: 587 - RNA, 21 nt, Artificial Seqence
  siRNA sense strand against b2GPI
aacaugcgauguuuggaaaug

SEQ ID NO: 588 - RNA, 21 nt, Artificial Seqence
  siRNA sense strand against b2GPI
acaugcgauguuuggaaauga

SEQ ID NO: 589 - RNA, 21 nt, Artificial Seqence
  siRNA sense strand against b2GPI
caugcgauguuuggaaaugau

SEQ ID NO: 590 - RNA, 21 nt, Artificial Seqence
  siRNA sense strand against b2GPI
augcgauguuuggaaaugaua

SEQ ID NO: 591 - RNA, 21 nt, Artificial Seqence
  siRNA sense strand against b2GPI
ugcgauguuuggaaaugauac

SEQ ID NO: 592 - RNA, 21 nt, Artificial Seqence
  siRNA sense strand against b2GPI
gcgauguuuggaaaugauaca

SEQ ID NO: 593 - RNA, 21 nt, Artificial Seqence
  siRNA sense strand against b2GPI
cgauguuuggaaaugauacaa

SEQ ID NO: 594 - RNA, 21 nt, Artificial Seqence
  siRNA sense strand against b2GPI
gauguuuggaaaugauacaau

SEQ ID NO: 595 - RNA, 21 nt, Artificial Seqence
  siRNA sense strand against b2GPI
auguuuggaaaugauacaauu

SEQ ID NO: 596 - RNA, 21 nt, Artificial Seqence
  siRNA sense strand against b2GPI
uguuuggaaaugauacaauua

SEQ ID NO: 597 - RNA, 21 nt, Artificial Seqence
  siRNA sense strand against b2GPI
guuuggaaaugauacaauuac

SEQ ID NO: 598 - RNA, 21 nt, Artificial Seqence
  siRNA sense strand against b2GPI
uuuggaaaugauacaauuacc

SEQ ID NO: 599 - RNA, 21 nt, Artificial Seqence
  siRNA sense strand against b2GPI
uuggaaaugauacaauuaccu

SEQ ID NO: 600 - RNA, 21 nt, Artificial Seqence
  siRNA sense strand against b2GPI
uggaaaugauacaauuaccug

SEQ ID NO: 601 - RNA, 21 nt, Artificial Seqence
  siRNA sense strand against b2GPI
ggaaaugauacaauuaccugc

SEQ ID NO: 602 - RNA, 21 nt, Artificial Seqence
  siRNA sense strand against b2GPI
gaaaugauacaauuaccugca

SEQ ID NO: 603 - RNA, 21 nt, Artificial Seqence
  siRNA sense strand against b2GPI
aaaugauacaauuaccugcac

SEQ ID NO: 604 - RNA, 21 nt, Artificial Seqence
  siRNA sense strand against b2GPI
aaugauacaauuaccugcacg

SEQ ID NO: 605 - RNA, 21 nt, Artificial Seqence
  siRNA sense strand against b2GPI
augauacaauuaccugcacga

SEQ ID NO: 606 - RNA, 21 nt, Artificial Seqence
  siRNA sense strand against b2GPI
ugauacaauuaccugcacgac

SEQ ID NO: 607 - RNA, 21 nt, Artificial Seqence
  siRNA sense strand against b2GPI
gauacaauuaccugcacgaca

SEQ ID NO: 608 - RNA, 21 nt, Artificial Seqence
  siRNA sense strand against b2GPI
auacaauuaccugcacgacac

SEQ ID NO: 609 - RNA, 21 nt, Artificial Seqence
  siRNA sense strand against b2GPI
uacaauuaccugcacgacaca

SEQ ID NO: 610 - RNA, 21 nt, Artificial Seqence
  siRNA sense strand against b2GPI
acaauuaccugcacgacacau

SEQ ID NO: 611 - RNA, 21 nt, Artificial Seqence
  siRNA sense strand against b2GPI
caauuaccugcacgacacaug

SEQ ID NO: 612 - RNA, 21 nt, Artificial Seqence
  siRNA sense strand against b2GPI
aauuaccugcacgacacaugg

SEQ ID NO: 613 - RNA, 21 nt, Artificial Seqence
  siRNA sense strand against b2GPI
auuaccugcacgacacaugga

SEQ ID NO: 614 - RNA, 21 nt, Artificial Seqence
  siRNA sense strand against b2GPI
uuaccugcacgacacauggaa

SEQ ID NO: 615 - RNA, 21 nt, Artificial Seqence
  siRNA sense strand against b2GPI
uaccugcacgacacauggaaa

SEQ ID NO: 616 - RNA, 21 nt, Artificial Seqence
  siRNA sense strand against b2GPI
accugcacgacacauggaaau

SEQ ID NO: 617 - RNA, 21 nt, Artificial Seqence
  siRNA sense strand against b2GPI
ccugcacgacacauggaaauu

SEQ ID NO: 618 - RNA, 21 nt, Artificial Seqence
  siRNA sense strand against b2GPI
cugcacgacacauggaaauug

SEQ ID NO: 619 - RNA, 21 nt, Artificial Seqence
  siRNA sense strand against b2GPI
ugcacgacacauggaaauugg

SEQ ID NO: 620 - RNA, 21 nt, Artificial Seqence
  siRNA sense strand against b2GPI
gcacgacacauggaaauugga

SEQ ID NO: 621 - RNA, 21 nt, Artificial Seqence
  siRNA sense strand against b2GPI
cacgacacauggaaauuggac

SEQ ID NO: 622 - RNA, 21 nt, Artificial Seqence
  siRNA sense strand against b2GPI
acgacacauggaaauuggacu

SEQ ID NO: 623 - RNA, 21 nt, Artificial Seqence
  siRNA sense strand against b2GPI
cgacacauggaaauuggacua

SEQ ID NO: 624 - RNA, 21 nt, Artificial Seqence
  siRNA sense strand against b2GPI
gacacauggaaauuggacuaa

SEQ ID NO: 625 - RNA, 21 nt, Artificial Seqence
  siRNA sense strand against b2GPI
acacauggaaauuggacuaaa

SEQ ID NO: 626 - RNA, 21 nt, Artificial Seqence
  siRNA sense strand against b2GPI
cacauggaaauuggacuaaau

SEQ ID NO: 627 - RNA, 21 nt, Artificial Seqence
  siRNA sense strand against b2GPI
acauggaaauuggacuaaauu

SEQ ID NO: 628 - RNA, 21 nt, Artificial Seqence
  siRNA sense strand against b2GPI
cauggaaauuggacuaaauua

SEQ ID NO: 629 - RNA, 21 nt, Artificial Seqence
  siRNA sense strand against b2GPI
auggaaauuggacuaaauuac

SEQ ID NO: 630 - RNA, 21 nt, Artificial Seqence
  siRNA sense strand against b2GPI
uggaaauuggacuaaauuacc

SEQ ID NO: 631 - RNA, 21 nt, Artificial Seqence
  siRNA sense strand against b2GPI
ggaaauuggacuaaauuacca

SEQ ID NO: 632 - RNA, 21 nt, Artificial Seqence
  siRNA sense strand against b2GPI
gaaauuggacuaaauuaccag

SEQ ID NO: 633 - RNA, 21 nt, Artificial Seqence
  siRNA sense strand against b2GPI
aaauuggacuaaauuaccaga

SEQ ID NO: 634 - RNA, 21 nt, Artificial Seqence
  siRNA sense strand against b2GPI
aauuggacuaaauuaccagaa

SEQ ID NO: 635 - RNA, 21 nt, Artificial Seqence
  siRNA sense strand against b2GPI
auuggacuaaauuaccagaau

SEQ ID NO: 636 - RNA, 21 nt, Artificial Seqence
  siRNA sense strand against b2GPI
uuggacuaaauuaccagaaug

SEQ ID NO: 637 - RNA, 21 nt, Artificial Seqence
  siRNA sense strand against b2GPI
uggacuaaauuaccagaaugc

SEQ ID NO: 638 - RNA, 21 nt, Artificial Seqence
  siRNA sense strand against b2GPI
ggacuaaauuaccagaaugca

SEQ ID NO: 639 - RNA, 21 nt, Artificial Seqence
  siRNA sense strand against b2GPI
gacuaaauuaccagaaugcag

SEQ ID NO: 640 - RNA, 21 nt, Artificial Seqence
  siRNA sense strand against b2GPI
acuaaauuaccagaaugcagg

SEQ ID NO: 641 - RNA, 21 nt, Artificial Seqence
  siRNA sense strand against b2GPI
cuaaauuaccagaaugcaggg

SEQ ID NO: 642 - RNA, 21 nt, Artificial Seqence
  siRNA sense strand against b2GPI
uaaauuaccagaaugcaggga

SEQ ID NO: 643 - RNA, 21 nt, Artificial Seqence
  siRNA sense strand against b2GPI
aaauuaccagaaugcagggaa

SEQ ID NO: 644 - RNA, 21 nt, Artificial Seqence
  siRNA sense strand against b2GPI
aauuaccagaaugcagggaag

SEQ ID NO: 645 - RNA, 21 nt, Artificial Seqence
  siRNA sense strand against b2GPI
auuaccagaaugcagggaagu

SEQ ID NO: 646 - RNA, 21 nt, Artificial Seqence
  siRNA sense strand against b2GPI
uuaccagaaugcagggaagua

SEQ ID NO: 647 - RNA, 21 nt, Artificial Seqence
  siRNA sense strand against b2GPI
uaccagaaugcagggaaguaa

SEQ ID NO: 648 - RNA, 21 nt, Artificial Seqence
  siRNA sense strand against b2GPI
accagaaugcagggaaguaaa

SEQ ID NO: 649 - RNA, 21 nt, Artificial Seqence
  siRNA sense strand against b2GPI
ccagaaugcagggaaguaaaa

SEQ ID NO: 650 - RNA, 21 nt, Artificial Seqence
  siRNA sense strand against b2GPI
cagaaugcagggaaguaaaau

SEQ ID NO: 651 - RNA, 21 nt, Artificial Seqence
  siRNA sense strand against b2GPI
agaaugcagggaaguaaaaug

SEQ ID NO: 652 - RNA, 21 nt, Artificial Seqence
  siRNA sense strand against b2GPI
gaaugcagggaaguaaaaugc

SEQ ID NO: 653 - RNA, 21 nt, Artificial Seqence
  siRNA sense strand against b2GPI
aaugcagggaaguaaaaugcc

SEQ ID NO: 654 - RNA, 21 nt, Artificial Seqence
  siRNA sense strand against b2GPI
augcagggaaguaaaaugccc

SEQ ID NO: 655 - RNA, 21 nt, Artificial Seqence
  siRNA sense strand against b2GPI
ugcagggaaguaaaaugccca

SEQ ID NO: 656 - RNA, 21 nt, Artificial Seqence
  siRNA sense strand against b2GPI
gcagggaaguaaaaugcccau

SEQ ID NO: 657 - RNA, 21 nt, Artificial Seqence
  siRNA sense strand against b2GPI
cagggaaguaaaaugcccauu

SEQ ID NO: 658 - RNA, 21 nt, Artificial Seqence
  siRNA sense strand against b2GPI
agggaaguaaaaugcccauuc

SEQ ID NO: 659 - RNA, 21 nt, Artificial Seqence
  siRNA sense strand against b2GPI
gggaaguaaaaugcccauucc

SEQ ID NO: 660 - RNA, 21 nt, Artificial Seqence
  siRNA sense strand against b2GPI
ggaaguaaaaugcccauuccc

SEQ ID NO: 661 - RNA, 21 nt, Artificial Seqence
  siRNA sense strand against b2GPI
gaaguaaaaugcccauuccca

SEQ ID NO: 662 - RNA, 21 nt, Artificial Seqence
  siRNA sense strand against b2GPI
aaguaaaaugcccauucccau

SEQ ID NO: 663 - RNA, 21 nt, Artificial Seqence
  siRNA sense strand against b2GPI
aguaaaaugcccauucccauc

SEQ ID NO: 664 - RNA, 21 nt, Artificial Seqence
  siRNA sense strand against b2GPI
guaaaaugcccauucccauca

SEQ ID NO: 665 - RNA, 21 nt, Artificial Seqence
  siRNA sense strand against b2GPI
uaaaaugcccauucccaucaa

SEQ ID NO: 666 - RNA, 21 nt, Artificial Seqence
  siRNA sense strand against b2GPI
aaaaugcccauucccaucaag

SEQ ID NO: 667 - RNA, 21 nt, Artificial Seqence
  siRNA sense strand against b2GPI
aaaugcccauucccaucaaga

SEQ ID NO: 668 - RNA, 21 nt, Artificial Seqence
  siRNA sense strand against b2GPI
aaugcccauucccaucaagac

SEQ ID NO: 669 - RNA, 21 nt, Artificial Seqence
  siRNA sense strand against b2GPI
augcccauucccaucaagacc

SEQ ID NO: 670 - RNA, 21 nt, Artificial Seqence
  siRNA sense strand against b2GPI
ugcccauucccaucaagacca

SEQ ID NO: 671 - RNA, 21 nt, Artificial Seqence
  siRNA sense strand against b2GPI
gcccauucccaucaagaccag

SEQ ID NO: 672 - RNA, 21 nt, Artificial Seqence
  siRNA sense strand against b2GPI
cccauucccaucaagaccaga

SEQ ID NO: 673 - RNA, 21 nt, Artificial Seqence
  siRNA sense strand against b2GPI
ccauucccaucaagaccagac

SEQ ID NO: 674 - RNA, 21 nt, Artificial Seqence
  siRNA sense strand against b2GPI
cauucccaucaagaccagaca

SEQ ID NO: 675 - RNA, 21 nt, Artificial Seqence
  siRNA sense strand against b2GPI
auucccaucaagaccagacaa

SEQ ID NO: 676 - RNA, 21 nt, Artificial Seqence
  siRNA sense strand against b2GPI
uucccaucaagaccagacaau

SEQ ID NO: 677 - RNA, 21 nt, Artificial Seqence
  siRNA sense strand against b2GPI
ucccaucaagaccagacaaug

SEQ ID NO: 678 - RNA, 21 nt, Artificial Seqence
  siRNA sense strand against b2GPI
cccaucaagaccagacaaugg

SEQ ID NO: 679 - RNA, 21 nt, Artificial Seqence
  siRNA sense strand against b2GPI
ccaucaagaccagacaaugga

SEQ ID NO: 680 - RNA, 21 nt, Artificial Seqence
  siRNA sense strand against b2GPI
caucaagaccagacaauggau

SEQ ID NO: 681 - RNA, 21 nt, Artificial Seqence
  siRNA sense strand against b2GPI
aucaagaccagacaauggauu

SEQ ID NO: 682 - RNA, 21 nt, Artificial Seqence
  siRNA sense strand against b2GPI
ucaagaccagacaauggauuu

SEQ ID NO: 683 - RNA, 21 nt, Artificial Seqence
  siRNA sense strand against b2GPI
caagaccagacaauggauuug

SEQ ID NO: 684 - RNA, 21 nt, Artificial Seqence
  siRNA sense strand against b2GPI
aagaccagacaauggauuugu

SEQ ID NO: 685 - RNA, 21 nt, Artificial Seqence
  siRNA sense strand against b2GPI
agaccagacaauggauuugug

SEQ ID NO: 686 - RNA, 21 nt, Artificial Seqence
  siRNA sense strand against b2GPI
gaccagacaauggauuuguga

SEQ ID NO: 687 - RNA, 21 nt, Artificial Seqence
  siRNA sense strand against b2GPI
accagacaauggauuugugaa

SEQ ID NO: 688 - RNA, 21 nt, Artificial Seqence
  siRNA sense strand against b2GPI
ccagacaauggauuugugaac

SEQ ID NO: 689 - RNA, 21 nt, Artificial Seqence
  siRNA sense strand against b2GPI
cagacaauggauuugugaacu

SEQ ID NO: 690 - RNA, 21 nt, Artificial Seqence
  siRNA sense strand against b2GPI
agacaauggauuugugaacua

SEQ ID NO: 691 - RNA, 21 nt, Artificial Seqence
  siRNA sense strand against b2GPI
gacaauggauuugugaacuau

SEQ ID NO: 692 - RNA, 21 nt, Artificial Seqence
  siRNA sense strand against b2GPI
acaauggauuugugaacuauc

SEQ ID NO: 693 - RNA, 21 nt, Artificial Seqence
  siRNA sense strand against b2GPI
caauggauuugugaacuaucc

SEQ ID NO: 694 - RNA, 21 nt, Artificial Seqence
  siRNA sense strand against b2GPI
aauggauuugugaacuauccu

SEQ ID NO: 695 - RNA, 21 nt, Artificial Seqence
  siRNA sense strand against b2GPI
auggauuugugaacuauccug

SEQ ID NO: 696 - RNA, 21 nt, Artificial Seqence
  siRNA sense strand against b2GPI
uggauuugugaacuauccugc

SEQ ID NO: 697 - RNA, 21 nt, Artificial Seqence
  siRNA sense strand against b2GPI
ggauuugugaacuauccugca

SEQ ID NO: 698 - RNA, 21 nt, Artificial Seqence
  siRNA sense strand against b2GPI
gauuugugaacuauccugcaa

SEQ ID NO: 699 - RNA, 21 nt, Artificial Seqence
  siRNA sense strand against b2GPI
auuugugaacuauccugcaaa

SEQ ID NO: 700 - RNA, 21 nt, Artificial Seqence
  siRNA sense strand against b2GPI
uuugugaacuauccugcaaaa

SEQ ID NO: 701 - RNA, 21 nt, Artificial Seqence
  siRNA sense strand against b2GPI
uugugaacuauccugcaaaac

SEQ ID NO: 702 - RNA, 21 nt, Artificial Seqence
  siRNA sense strand against b2GPI
ugugaacuauccugcaaaacc

SEQ ID NO: 703 - RNA, 21 nt, Artificial Seqence
  siRNA sense strand against b2GPI
gugaacuauccugcaaaacca

SEQ ID NO: 704 - RNA, 21 nt, Artificial Seqence
  siRNA sense strand against b2GPI
ugaacuauccugcaaaaccaa

SEQ ID NO: 705 - RNA, 21 nt, Artificial Seqence
  siRNA sense strand against b2GPI
gaacuauccugcaaaaccaac

SEQ ID NO: 706 - RNA, 21 nt, Artificial Seqence
  siRNA sense strand against b2GPI
aacuauccugcaaaaccaaca

SEQ ID NO: 707 - RNA, 21 nt, Artificial Seqence
  siRNA sense strand against b2GPI
acuauccugcaaaaccaacac

SEQ ID NO: 708 - RNA, 21 nt, Artificial Seqence
  siRNA sense strand against b2GPI
cuauccugcaaaaccaacacu

SEQ ID NO: 709 - RNA, 21 nt, Artificial Seqence
  siRNA sense strand against b2GPI
uauccugcaaaaccaacacuu

SEQ ID NO: 710 - RNA, 21 nt, Artificial Seqence
  siRNA sense strand against b2GPI
auccugcaaaaccaacacuuu

SEQ ID NO: 711 - RNA, 21 nt, Artificial Seqence
  siRNA sense strand against b2GPI
uccugcaaaaccaacacuuua

SEQ ID NO: 712 - RNA, 21 nt, Artificial Seqence
  siRNA sense strand against b2GPI
ccugcaaaaccaacacuuuau

SEQ ID NO: 713 - RNA, 21 nt, Artificial Seqence
  siRNA sense strand against b2GPI
cugcaaaaccaacacuuuauu

SEQ ID NO: 714 - RNA, 21 nt, Artificial Seqence
  siRNA sense strand against b2GPI
ugcaaaaccaacacuuuauua

SEQ ID NO: 715 - RNA, 21 nt, Artificial Seqence
  siRNA sense strand against b2GPI
gcaaaaccaacacuuuauuac

SEQ ID NO: 716 - RNA, 21 nt, Artificial Seqence
  siRNA sense strand against b2GPI
caaaaccaacacuuuauuaca

SEQ ID NO: 717 - RNA, 21 nt, Artificial Seqence
  siRNA sense strand against b2GPI
aaaaccaacacuuuauuacaa

SEQ ID NO: 718 - RNA, 21 nt, Artificial Seqence
  siRNA sense strand against b2GPI
aaaccaacacuuuauuacaag

SEQ ID NO: 719 - RNA, 21 nt, Artificial Seqence
  siRNA sense strand against b2GPI
aaccaacacuuuauuacaagg

SEQ ID NO: 720 - RNA, 21 nt, Artificial Seqence
  siRNA sense strand against b2GPI
accaacacuuuauuacaagga

SEQ ID NO: 721 - RNA, 21 nt, Artificial Seqence
  siRNA sense strand against b2GPI
ccaacacuuuauuacaaggau

SEQ ID NO: 722 - RNA, 21 nt, Artificial Seqence
  siRNA sense strand against b2GPI
caacacuuuauuacaaggaua

SEQ ID NO: 723 - RNA, 21 nt, Artificial Seqence
  siRNA sense strand against b2GPI
aacacuuuauuacaaggauaa

SEQ ID NO: 724 - RNA, 21 nt, Artificial Seqence
  siRNA sense strand against b2GPI
acacuuuauuacaaggauaaa

SEQ ID NO: 725 - RNA, 21 nt, Artificial Seqence
  siRNA sense strand against b2GPI
cacuuuauuacaaggauaaag

SEQ ID NO: 726 - RNA, 21 nt, Artificial Seqence
  siRNA sense strand against b2GPI
acuuuauuacaaggauaaagc

SEQ ID NO: 727 - RNA, 21 nt, Artificial Seqence
  siRNA sense strand against b2GPI
cuuuauuacaaggauaaagcc

SEQ ID NO: 728 - RNA, 21 nt, Artificial Seqence
  siRNA sense strand against b2GPI
uuuauuacaaggauaaagcca

SEQ ID NO: 729 - RNA, 21 nt, Artificial Seqence
  siRNA sense strand against b2GPI
uuauuacaaggauaaagccac

SEQ ID NO: 730 - RNA, 21 nt, Artificial Seqence
  siRNA sense strand against b2GPI
uauuacaaggauaaagccaca

SEQ ID NO: 731 - RNA, 21 nt, Artificial Seqence
  siRNA sense strand against b2GPI
auuacaaggauaaagccacau

SEQ ID NO: 732 - RNA, 21 nt, Artificial Seqence
  siRNA sense strand against b2GPI
uuacaaggauaaagccacauu

SEQ ID NO: 733 - RNA, 21 nt, Artificial Seqence
  siRNA sense strand against b2GPI
uacaaggauaaagccacauuu

SEQ ID NO: 734 - RNA, 21 nt, Artificial Seqence
  siRNA sense strand against b2GPI
acaaggauaaagccacauuug

SEQ ID NO: 735 - RNA, 21 nt, Artificial Seqence
  siRNA sense strand against b2GPI
caaggauaaagccacauuugg

SEQ ID NO: 736 - RNA, 21 nt, Artificial Seqence
  siRNA sense strand against b2GPI
aaggauaaagccacauuuggc

SEQ ID NO: 737 - RNA, 21 nt, Artificial Seqence
  siRNA sense strand against b2GPI
aggauaaagccacauuuggcu

SEQ ID NO: 738 - RNA, 21 nt, Artificial Seqence
  siRNA sense strand against b2GPI
ggauaaagccacauuuggcug

SEQ ID NO: 739 - RNA, 21 nt, Artificial Seqence
  siRNA sense strand against b2GPI
gauaaagccacauuuggcugc

SEQ ID NO: 740 - RNA, 21 nt, Artificial Seqence
  siRNA sense strand against b2GPI
auaaagccacauuuggcugcc

SEQ ID NO: 741 - RNA, 21 nt, Artificial Seqence
  siRNA sense strand against b2GPI
uaaagccacauuuggcugcca

SEQ ID NO: 742 - RNA, 21 nt, Artificial Seqence
  siRNA sense strand against b2GPI
aaagccacauuuggcugccau

SEQ ID NO: 743 - RNA, 21 nt, Artificial Seqence
  siRNA sense strand against b2GPI
aagccacauuuggcugccaug

SEQ ID NO: 744 - RNA, 21 nt, Artificial Seqence
  siRNA sense strand against b2GPI
agccacauuuggcugccauga

SEQ ID NO: 745 - RNA, 21 nt, Artificial Seqence
  siRNA sense strand against b2GPI
gccacauuuggcugccaugau

SEQ ID NO: 746 - RNA, 21 nt, Artificial Seqence
  siRNA sense strand against b2GPI
ccacauuuggcugccaugaug

SEQ ID NO: 747 - RNA, 21 nt, Artificial Seqence
  siRNA sense strand against b2GPI
cacauuuggcugccaugaugg

SEQ ID NO: 748 - RNA, 21 nt, Artificial Seqence
  siRNA sense strand against b2GPI
acauuuggcugccaugaugga

SEQ ID NO: 749 - RNA, 21 nt, Artificial Seqence
  siRNA sense strand against b2GPI
cauuuggcugccaugauggau

SEQ ID NO: 750 - RNA, 21 nt, Artificial Seqence
  siRNA sense strand against b2GPI
auuuggcugccaugauggaua

SEQ ID NO: 751 - RNA, 21 nt, Artificial Seqence
  siRNA sense strand against b2GPI
uuuggcugccaugauggauau

SEQ ID NO: 752 - RNA, 21 nt, Artificial Seqence
  siRNA sense strand against b2GPI
uuggcugccaugauggauauu

SEQ ID NO: 753 - RNA, 21 nt, Artificial Seqence
  siRNA sense strand against b2GPI
uggcugccaugauggauauuc

SEQ ID NO: 754 - RNA, 21 nt, Artificial Seqence
  siRNA sense strand against b2GPI
ggcugccaugauggauauucu

SEQ ID NO: 755 - RNA, 21 nt, Artificial Seqence
  siRNA sense strand against b2GPI
gcugccaugauggauauucuc

SEQ ID NO: 756 - RNA, 21 nt, Artificial Seqence
  siRNA sense strand against b2GPI
cugccaugauggauauucucu

SEQ ID NO: 757 - RNA, 21 nt, Artificial Seqence
  siRNA sense strand against b2GPI
ugccaugauggauauucucug

SEQ ID NO: 758 - RNA, 21 nt, Artificial Seqence
  siRNA sense strand against b2GPI
gccaugauggauauucucugg

SEQ ID NO: 759 - RNA, 21 nt, Artificial Seqence
  siRNA sense strand against b2GPI
ccaugauggauauucucugga

SEQ ID NO: 760 - RNA, 21 nt, Artificial Seqence
  siRNA sense strand against b2GPI
caugauggauauucucuggau

SEQ ID NO: 761 - RNA, 21 nt, Artificial Seqence
  siRNA sense strand against b2GPI
augauggauauucucuggaug

SEQ ID NO: 762 - RNA, 21 nt, Artificial Seqence
  siRNA sense strand against b2GPI
ugauggauauucucuggaugg

SEQ ID NO: 763 - RNA, 21 nt, Artificial Seqence
  siRNA sense strand against b2GPI
gauggauauucucuggauggc

SEQ ID NO: 764 - RNA, 21 nt, Artificial Seqence
  siRNA sense strand against b2GPI
auggauauucucuggauggcc

SEQ ID NO: 765 - RNA, 21 nt, Artificial Seqence
  siRNA sense strand against b2GPI
uggauauucucuggauggccc

SEQ ID NO: 766 - RNA, 21 nt, Artificial Seqence
  siRNA sense strand against b2GPI
ggauauucucuggauggcccg

SEQ ID NO: 767 - RNA, 21 nt, Artificial Seqence
  siRNA sense strand against b2GPI
gauauucucuggauggcccgg

SEQ ID NO: 768 - RNA, 21 nt, Artificial Seqence
  siRNA sense strand against b2GPI
auauucucuggauggcccgga

SEQ ID NO: 769 - RNA, 21 nt, Artificial Seqence
  siRNA sense strand against b2GPI
uauucucuggauggcccggaa

SEQ ID NO: 770 - RNA, 21 nt, Artificial Seqence
  siRNA sense strand against b2GPI
auucucuggauggcccggaag

SEQ ID NO: 771 - RNA, 21 nt, Artificial Seqence
  siRNA sense strand against b2GPI
uucucuggauggcccggaaga

SEQ ID NO: 772 - RNA, 21 nt, Artificial Seqence
  siRNA sense strand against b2GPI
ucucuggauggcccggaagaa

SEQ ID NO: 773 - RNA, 21 nt, Artificial Seqence
  siRNA sense strand against b2GPI
cucuggauggcccggaagaaa

SEQ ID NO: 774 - RNA, 21 nt, Artificial Seqence
  siRNA sense strand against b2GPI
ucuggauggcccggaagaaau

SEQ ID NO: 775 - RNA, 21 nt, Artificial Seqence
  siRNA sense strand against b2GPI
cuggauggcccggaagaaaua

SEQ ID NO: 776 - RNA, 21 nt, Artificial Seqence
  siRNA sense strand against b2GPI
uggauggcccggaagaaauag

SEQ ID NO: 777 - RNA, 21 nt, Artificial Seqence
  siRNA sense strand against b2GPI
ggauggcccggaagaaauaga

SEQ ID NO: 778 - RNA, 21 nt, Artificial Seqence
  siRNA sense strand against b2GPI
gauggcccggaagaaauagaa

SEQ ID NO: 779 - RNA, 21 nt, Artificial Seqence
  siRNA sense strand against b2GPI
auggcccggaagaaauagaau

SEQ ID NO: 780 - RNA, 21 nt, Artificial Seqence
  siRNA sense strand against b2GPI
uggcccggaagaaauagaaug

SEQ ID NO: 781 - RNA, 21 nt, Artificial Seqence
  siRNA sense strand against b2GPI
ggcccggaagaaauagaaugu

SEQ ID NO: 782 - RNA, 21 nt, Artificial Seqence
  siRNA sense strand against b2GPI
gcccggaagaaauagaaugua

SEQ ID NO: 783 - RNA, 21 nt, Artificial Seqence
  siRNA sense strand against b2GPI
cccggaagaaauagaauguac

SEQ ID NO: 784 - RNA, 21 nt, Artificial Seqence
  siRNA sense strand against b2GPI
ccggaagaaauagaauguacc

SEQ ID NO: 785 - RNA, 21 nt, Artificial Seqence
  siRNA sense strand against b2GPI
cggaagaaauagaauguacca

SEQ ID NO: 786 - RNA, 21 nt, Artificial Seqence
  siRNA sense strand against b2GPI
ggaagaaauagaauguaccaa

SEQ ID NO: 787 - RNA, 21 nt, Artificial Seqence
  siRNA sense strand against b2GPI
gaagaaauagaauguaccaaa

SEQ ID NO: 788 - RNA, 21 nt, Artificial Seqence
  siRNA sense strand against b2GPI
aagaaauagaauguaccaaac

SEQ ID NO: 789 - RNA, 21 nt, Artificial Seqence
  siRNA sense strand against b2GPI
agaaauagaauguaccaaacu

SEQ ID NO: 790 - RNA, 21 nt, Artificial Seqence
  siRNA sense strand against b2GPI
gaaauagaauguaccaaacug

SEQ ID NO: 791 - RNA, 21 nt, Artificial Seqence
  siRNA sense strand against b2GPI
aaauagaauguaccaaacugg

SEQ ID NO: 792 - RNA, 21 nt, Artificial Seqence
  siRNA sense strand against b2GPI
aauagaauguaccaaacuggg

SEQ ID NO: 793 - RNA, 21 nt, Artificial Seqence
  siRNA sense strand against b2GPI
auagaauguaccaaacuggga

SEQ ID NO: 794 - RNA, 21 nt, Artificial Seqence
  siRNA sense strand against b2GPI
uagaauguaccaaacugggaa

SEQ ID NO: 795 - RNA, 21 nt, Artificial Seqence
  siRNA sense strand against b2GPI
agaauguaccaaacugggaaa

SEQ ID NO: 796 - RNA, 21 nt, Artificial Seqence
  siRNA sense strand against b2GPI
gaauguaccaaacugggaaac

SEQ ID NO: 797 - RNA, 21 nt, Artificial Seqence
  siRNA sense strand against b2GPI
aauguaccaaacugggaaacu

SEQ ID NO: 798 - RNA, 21 nt, Artificial Seqence
  siRNA sense strand against b2GPI
auguaccaaacugggaaacug

SEQ ID NO: 799 - RNA, 21 nt, Artificial Seqence
  siRNA sense strand against b2GPI
uguaccaaacugggaaacugg

SEQ ID NO: 800 - RNA, 21 nt, Artificial Seqence
  siRNA sense strand against b2GPI
guaccaaacugggaaacuggu

SEQ ID NO: 801 - RNA, 21 nt, Artificial Seqence
  siRNA sense strand against b2GPI
uaccaaacugggaaacugguc

SEQ ID NO: 802 - RNA, 21 nt, Artificial Seqence
  siRNA sense strand against b2GPI
accaaacugggaaacuggucu

SEQ ID NO: 803 - RNA, 21 nt, Artificial Seqence
  siRNA sense strand against b2GPI
ccaaacugggaaacuggucug

SEQ ID NO: 804 - RNA, 21 nt, Artificial Seqence
  siRNA sense strand against b2GPI
caaacugggaaacuggucugc

SEQ ID NO: 805 - RNA, 21 nt, Artificial Seqence
  siRNA sense strand against b2GPI
aaacugggaaacuggucugcc

SEQ ID NO: 806 - RNA, 21 nt, Artificial Seqence
  siRNA sense strand against b2GPI
aacugggaaacuggucugcca

SEQ ID NO: 807 - RNA, 21 nt, Artificial Seqence
  siRNA sense strand against b2GPI
acugggaaacuggucugccau

SEQ ID NO: 808 - RNA, 21 nt, Artificial Seqence
  siRNA sense strand against b2GPI
cugggaaacuggucugccaug

SEQ ID NO: 809 - RNA, 21 nt, Artificial Seqence
  siRNA sense strand against b2GPI
ugggaaacuggucugccaugc

SEQ ID NO: 810 - RNA, 21 nt, Artificial Seqence
  siRNA sense strand against b2GPI
gggaaacuggucugccaugcc

SEQ ID NO: 811 - RNA, 21 nt, Artificial Seqence
  siRNA sense strand against b2GPI
ggaaacuggucugccaugcca

SEQ ID NO: 812 - RNA, 21 nt, Artificial Seqence
  siRNA sense strand against b2GPI
gaaacuggucugccaugccaa

SEQ ID NO: 813 - RNA, 21 nt, Artificial Seqence
  siRNA sense strand against b2GPI
aaacuggucugccaugccaag

SEQ ID NO: 814 - RNA, 21 nt, Artificial Seqence
  siRNA sense strand against b2GPI
aacuggucugccaugccaagu

SEQ ID NO: 815 - RNA, 21 nt, Artificial Seqence
  siRNA sense strand against b2GPI
acuggucugccaugccaaguu

SEQ ID NO: 816 - RNA, 21 nt, Artificial Seqence
  siRNA sense strand against b2GPI
cuggucugccaugccaaguug

SEQ ID NO: 817 - RNA, 21 nt, Artificial Seqence
  siRNA sense strand against b2GPI
uggucugccaugccaaguugu

SEQ ID NO: 818 - RNA, 21 nt, Artificial Seqence
  siRNA sense strand against b2GPI
ggucugccaugccaaguugua

SEQ ID NO: 819 - RNA, 21 nt, Artificial Seqence
  siRNA sense strand against b2GPI
gucugccaugccaaguuguaa

SEQ ID NO: 820 - RNA, 21 nt, Artificial Seqence
  siRNA sense strand against b2GPI
ucugccaugccaaguuguaaa

SEQ ID NO: 821 - RNA, 21 nt, Artificial Seqence
  siRNA sense strand against b2GPI
cugccaugccaaguuguaaag

SEQ ID NO: 822 - RNA, 21 nt, Artificial Seqence
  siRNA sense strand against b2GPI
ugccaugccaaguuguaaagc

SEQ ID NO: 823 - RNA, 21 nt, Artificial Seqence
  siRNA sense strand against b2GPI
gccaugccaaguuguaaagca

SEQ ID NO: 824 - RNA, 21 nt, Artificial Seqence
  siRNA sense strand against b2GPI
ccaugccaaguuguaaagcau

SEQ ID NO: 825 - RNA, 21 nt, Artificial Seqence
  siRNA sense strand against b2GPI
caugccaaguuguaaagcauc

SEQ ID NO: 826 - RNA, 21 nt, Artificial Seqence
  siRNA sense strand against b2GPI
augccaaguuguaaagcaucu

SEQ ID NO: 827 - RNA, 21 nt, Artificial Seqence
  siRNA sense strand against b2GPI
ugccaaguuguaaagcaucuu

SEQ ID NO: 828 - RNA, 21 nt, Artificial Seqence
  siRNA sense strand against b2GPI
gccaaguuguaaagcaucuug

SEQ ID NO: 829 - RNA, 21 nt, Artificial Seqence
  siRNA sense strand against b2GPI
ccaaguuguaaagcaucuugu

SEQ ID NO: 830 - RNA, 21 nt, Artificial Seqence
  siRNA sense strand against b2GPI
caaguuguaaagcaucuugua

SEQ ID NO: 831 - RNA, 21 nt, Artificial Seqence
  siRNA sense strand against b2GPI
aaguuguaaagcaucuuguaa

SEQ ID NO: 832 - RNA, 21 nt, Artificial Seqence
  siRNA sense strand against b2GPI
aguuguaaagcaucuuguaaa

SEQ ID NO: 833 - RNA, 21 nt, Artificial Seqence
  siRNA sense strand against b2GPI
guuguaaagcaucuuguaaag

SEQ ID NO: 834 - RNA, 21 nt, Artificial Seqence
  siRNA sense strand against b2GPI
uuguaaagcaucuuguaaagu

SEQ ID NO: 835 - RNA, 21 nt, Artificial Seqence
  siRNA sense strand against b2GPI
uguaaagcaucuuguaaagua

SEQ ID NO: 836 - RNA, 21 nt, Artificial Seqence
  siRNA sense strand against b2GPI
guaaagcaucuuguaaaguac

SEQ ID NO: 837 - RNA, 21 nt, Artificial Seqence
  siRNA sense strand against b2GPI
uaaagcaucuuguaaaguacc

SEQ ID NO: 838 - RNA, 21 nt, Artificial Seqence
  siRNA sense strand against b2GPI
aaagcaucuuguaaaguaccu

SEQ ID NO: 839 - RNA, 21 nt, Artificial Seqence
  siRNA sense strand against b2GPI
aagcaucuuguaaaguaccug

SEQ ID NO: 840 - RNA, 21 nt, Artificial Seqence
  siRNA sense strand against b2GPI
agcaucuuguaaaguaccugu

SEQ ID NO: 841 - RNA, 21 nt, Artificial Seqence
  siRNA sense strand against b2GPI
gcaucuuguaaaguaccugug

SEQ ID NO: 842 - RNA, 21 nt, Artificial Seqence
  siRNA sense strand against b2GPI
caucuuguaaaguaccuguga

SEQ ID NO: 843 - RNA, 21 nt, Artificial Seqence
  siRNA sense strand against b2GPI
aucuuguaaaguaccugugaa

SEQ ID NO: 844 - RNA, 21 nt, Artificial Seqence
  siRNA sense strand against b2GPI
ucuuguaaaguaccugugaaa

SEQ ID NO: 845 - RNA, 21 nt, Artificial Seqence
  siRNA sense strand against b2GPI
cuuguaaaguaccugugaaaa

SEQ ID NO: 846 - RNA, 21 nt, Artificial Seqence
  siRNA sense strand against b2GPI
uuguaaaguaccugugaaaaa

SEQ ID NO: 847 - RNA, 21 nt, Artificial Seqence
  siRNA sense strand against b2GPI
uguaaaguaccugugaaaaaa

SEQ ID NO: 848 - RNA, 21 nt, Artificial Seqence
  siRNA sense strand against b2GPI
guaaaguaccugugaaaaaag

SEQ ID NO: 849 - RNA, 21 nt, Artificial Seqence
  siRNA sense strand against b2GPI
uaaaguaccugugaaaaaagc

SEQ ID NO: 850 - RNA, 21 nt, Artificial Seqence
  siRNA sense strand against b2GPI
aaaguaccugugaaaaaagcc

SEQ ID NO: 851 - RNA, 21 nt, Artificial Seqence
  siRNA sense strand against b2GPI
aaguaccugugaaaaaagcca

SEQ ID NO: 852 - RNA, 21 nt, Artificial Seqence
  siRNA sense strand against b2GPI
aguaccugugaaaaaagccac

SEQ ID NO: 853 - RNA, 21 nt, Artificial Seqence
  siRNA sense strand against b2GPI
guaccugugaaaaaagccacu

SEQ ID NO: 854 - RNA, 21 nt, Artificial Seqence
  siRNA sense strand against b2GPI
uaccugugaaaaaagccacug

SEQ ID NO: 855 - RNA, 21 nt, Artificial Seqence
  siRNA sense strand against b2GPI
accugugaaaaaagccacugu

SEQ ID NO: 856 - RNA, 21 nt, Artificial Seqence
  siRNA sense strand against b2GPI
ccugugaaaaaagccacugug

SEQ ID NO: 857 - RNA, 21 nt, Artificial Seqence
  siRNA sense strand against b2GPI
cugugaaaaaagccacugugg

SEQ ID NO: 858 - RNA, 21 nt, Artificial Seqence
  siRNA sense strand against b2GPI
ugugaaaaaagccacuguggu

SEQ ID NO: 859 - RNA, 21 nt, Artificial Seqence
  siRNA sense strand against b2GPI
gugaaaaaagccacuguggug

SEQ ID NO: 860 - RNA, 21 nt, Artificial Seqence
  siRNA sense strand against b2GPI
ugaaaaaagccacuguggugu

SEQ ID NO: 861 - RNA, 21 nt, Artificial Seqence
  siRNA sense strand against b2GPI
gaaaaaagccacuguggugua

SEQ ID NO: 862 - RNA, 21 nt, Artificial Seqence
  siRNA sense strand against b2GPI
aaaaaagccacugugguguac

SEQ ID NO: 863 - RNA, 21 nt, Artificial Seqence
  siRNA sense strand against b2GPI
aaaaagccacugugguguacc

SEQ ID NO: 864 - RNA, 21 nt, Artificial Seqence
  siRNA sense strand against b2GPI
aaaagccacugugguguacca

SEQ ID NO: 865 - RNA, 21 nt, Artificial Seqence
  siRNA sense strand against b2GPI
aaagccacugugguguaccaa

SEQ ID NO: 866 - RNA, 21 nt, Artificial Seqence
  siRNA sense strand against b2GPI
aagccacugugguguaccaag

SEQ ID NO: 867 - RNA, 21 nt, Artificial Seqence
  siRNA sense strand against b2GPI
agccacugugguguaccaagg

SEQ ID NO: 868 - RNA, 21 nt, Artificial Seqence
  siRNA sense strand against b2GPI
gccacugugguguaccaagga

SEQ ID NO: 869 - RNA, 21 nt, Artificial Seqence
  siRNA sense strand against b2GPI
ccacugugguguaccaaggag

SEQ ID NO: 870 - RNA, 21 nt, Artificial Seqence
  siRNA sense strand against b2GPI
cacugugguguaccaaggaga

SEQ ID NO: 871 - RNA, 21 nt, Artificial Seqence
  siRNA sense strand against b2GPI
acugugguguaccaaggagag

SEQ ID NO: 872 - RNA, 21 nt, Artificial Seqence
  siRNA sense strand against b2GPI
cugugguguaccaaggagaga

SEQ ID NO: 873 - RNA, 21 nt, Artificial Seqence
  siRNA sense strand against b2GPI
ugugguguaccaaggagagag

SEQ ID NO: 874 - RNA, 21 nt, Artificial Seqence
  siRNA sense strand against b2GPI
gugguguaccaaggagagaga

SEQ ID NO: 875 - RNA, 21 nt, Artificial Seqence
  siRNA sense strand against b2GPI
ugguguaccaaggagagagag

SEQ ID NO: 876 - RNA, 21 nt, Artificial Seqence
  siRNA sense strand against b2GPI
gguguaccaaggagagagagu

SEQ ID NO: 877 - RNA, 21 nt, Artificial Seqence
  siRNA sense strand against b2GPI
guguaccaaggagagagagua

SEQ ID NO: 878 - RNA, 21 nt, Artificial Seqence
  siRNA sense strand against b2GPI
uguaccaaggagagagaguaa

SEQ ID NO: 879 - RNA, 21 nt, Artificial Seqence
  siRNA sense strand against b2GPI
guaccaaggagagagaguaaa

SEQ ID NO: 880 - RNA, 21 nt, Artificial Seqence
  siRNA sense strand against b2GPI
uaccaaggagagagaguaaag

SEQ ID NO: 881 - RNA, 21 nt, Artificial Seqence
  siRNA sense strand against b2GPI
accaaggagagagaguaaaga

SEQ ID NO: 882 - RNA, 21 nt, Artificial Seqence
  siRNA sense strand against b2GPI
ccaaggagagagaguaaagau

SEQ ID NO: 883 - RNA, 21 nt, Artificial Seqence
  siRNA sense strand against b2GPI
caaggagagagaguaaagauu

SEQ ID NO: 884 - RNA, 21 nt, Artificial Seqence
  siRNA sense strand against b2GPI
aaggagagagaguaaagauuc

SEQ ID NO: 885 - RNA, 21 nt, Artificial Seqence
  siRNA sense strand against b2GPI
aggagagagaguaaagauuca

SEQ ID NO: 886 - RNA, 21 nt, Artificial Seqence
  siRNA sense strand against b2GPI
ggagagagaguaaagauucag

SEQ ID NO: 887 - RNA, 21 nt, Artificial Seqence
  siRNA sense strand against b2GPI
gagagagaguaaagauucagg

SEQ ID NO: 888 - RNA, 21 nt, Artificial Seqence
  siRNA sense strand against b2GPI
agagagaguaaagauucagga

SEQ ID NO: 889 - RNA, 21 nt, Artificial Seqence
  siRNA sense strand against b2GPI
gagagaguaaagauucaggaa

SEQ ID NO: 890 - RNA, 21 nt, Artificial Seqence
  siRNA sense strand against b2GPI
agagaguaaagauucaggaaa

SEQ ID NO: 891 - RNA, 21 nt, Artificial Seqence
  siRNA sense strand against b2GPI
gagaguaaagauucaggaaaa

SEQ ID NO: 892 - RNA, 21 nt, Artificial Seqence
  siRNA sense strand against b2GPI
agaguaaagauucaggaaaaa

SEQ ID NO: 893 - RNA, 21 nt, Artificial Seqence
  siRNA sense strand against b2GPI
gaguaaagauucaggaaaaau

SEQ ID NO: 894 - RNA, 21 nt, Artificial Seqence
  siRNA sense strand against b2GPI
aguaaagauucaggaaaaauu

SEQ ID NO: 895 - RNA, 21 nt, Artificial Seqence
  siRNA sense strand against b2GPI
guaaagauucaggaaaaauuu

SEQ ID NO: 896 - RNA, 21 nt, Artificial Seqence
  siRNA sense strand against b2GPI
uaaagauucaggaaaaauuua

SEQ ID NO: 897 - RNA, 21 nt, Artificial Seqence
  siRNA sense strand against b2GPI
aaagauucaggaaaaauuuaa

SEQ ID NO: 898 - RNA, 21 nt, Artificial Seqence
  siRNA sense strand against b2GPI
aagauucaggaaaaauuuaag

SEQ ID NO: 899 - RNA, 21 nt, Artificial Seqence
  siRNA sense strand against b2GPI
agauucaggaaaaauuuaaga

SEQ ID NO: 900 - RNA, 21 nt, Artificial Seqence
  siRNA sense strand against b2GPI
gauucaggaaaaauuuaagaa

SEQ ID NO: 901 - RNA, 21 nt, Artificial Seqence
  siRNA sense strand against b2GPI
auucaggaaaaauuuaagaau

SEQ ID NO: 902 - RNA, 21 nt, Artificial Seqence
  siRNA sense strand against b2GPI
uucaggaaaaauuuaagaaug

SEQ ID NO: 903 - RNA, 21 nt, Artificial Seqence
  siRNA sense strand against b2GPI
ucaggaaaaauuuaagaaugg

SEQ ID NO: 904 - RNA, 21 nt, Artificial Seqence
  siRNA sense strand against b2GPI
caggaaaaauuuaagaaugga

SEQ ID NO: 905 - RNA, 21 nt, Artificial Seqence
  siRNA sense strand against b2GPI
aggaaaaauuuaagaauggaa

SEQ ID NO: 906 - RNA, 21 nt, Artificial Seqence
  siRNA sense strand against b2GPI
ggaaaaauuuaagaauggaau

SEQ ID NO: 907 - RNA, 21 nt, Artificial Seqence
  siRNA sense strand against b2GPI
gaaaaauuuaagaauggaaug

SEQ ID NO: 908 - RNA, 21 nt, Artificial Seqence
  siRNA sense strand against b2GPI
aaaaauuuaagaauggaaugc

SEQ ID NO: 909 - RNA, 21 nt, Artificial Seqence
  siRNA sense strand against b2GPI
aaaauuuaagaauggaaugcu

SEQ ID NO: 910 - RNA, 21 nt, Artificial Seqence
  siRNA sense strand against b2GPI
aaauuuaagaauggaaugcua

SEQ ID NO: 911 - RNA, 21 nt, Artificial Seqence
  siRNA sense strand against b2GPI
aauuuaagaauggaaugcuac

SEQ ID NO: 912 - RNA, 21 nt, Artificial Seqence
  siRNA sense strand against b2GPI
auuuaagaauggaaugcuaca

SEQ ID NO: 913 - RNA, 21 nt, Artificial Seqence
  siRNA sense strand against b2GPI
uuuaagaauggaaugcuacau

SEQ ID NO: 914 - RNA, 21 nt, Artificial Seqence
  siRNA sense strand against b2GPI
uuaagaauggaaugcuacaug

SEQ ID NO: 915 - RNA, 21 nt, Artificial Seqence
  siRNA sense strand against b2GPI
uaagaauggaaugcuacaugg

SEQ ID NO: 916 - RNA, 21 nt, Artificial Seqence
  siRNA sense strand against b2GPI
aagaauggaaugcuacauggu

SEQ ID NO: 917 - RNA, 21 nt, Artificial Seqence
  siRNA sense strand against b2GPI
agaauggaaugcuacauggug

SEQ ID NO: 918 - RNA, 21 nt, Artificial Seqence
  siRNA sense strand against b2GPI
gaauggaaugcuacaugguga

SEQ ID NO: 919 - RNA, 21 nt, Artificial Seqence
  siRNA sense strand against b2GPI
aauggaaugcuacauggugau

SEQ ID NO: 920 - RNA, 21 nt, Artificial Seqence
  siRNA sense strand against b2GPI
auggaaugcuacauggugaua

SEQ ID NO: 921 - RNA, 21 nt, Artificial Seqence
  siRNA sense strand against b2GPI
uggaaugcuacauggugauaa

SEQ ID NO: 922 - RNA, 21 nt, Artificial Seqence
  siRNA sense strand against b2GPI
ggaaugcuacauggugauaaa

SEQ ID NO: 923 - RNA, 21 nt, Artificial Seqence
  siRNA sense strand against b2GPI
gaaugcuacauggugauaaag

SEQ ID NO: 924 - RNA, 21 nt, Artificial Seqence
  siRNA sense strand against b2GPI
aaugcuacauggugauaaagu

SEQ ID NO: 925 - RNA, 21 nt, Artificial Seqence
  siRNA sense strand against b2GPI
augcuacauggugauaaaguu

SEQ ID NO: 926 - RNA, 21 nt, Artificial Seqence
  siRNA sense strand against b2GPI
ugcuacauggugauaaaguuu

SEQ ID NO: 927 - RNA, 21 nt, Artificial Seqence
  siRNA sense strand against b2GPI
gcuacauggugauaaaguuuc

SEQ ID NO: 928 - RNA, 21 nt, Artificial Seqence
  siRNA sense strand against b2GPI
cuacauggugauaaaguuucu

SEQ ID NO: 929 - RNA, 21 nt, Artificial Seqence
  siRNA sense strand against b2GPI
uacauggugauaaaguuucuu

SEQ ID NO: 930 - RNA, 21 nt, Artificial Seqence
  siRNA sense strand against b2GPI
acauggugauaaaguuucuuu

SEQ ID NO: 931 - RNA, 21 nt, Artificial Seqence
  siRNA sense strand against b2GPI
cauggugauaaaguuucuuuc

SEQ ID NO: 932 - RNA, 21 nt, Artificial Seqence
  siRNA sense strand against b2GPI
auggugauaaaguuucuuucu

SEQ ID NO: 933 - RNA, 21 nt, Artificial Seqence
  siRNA sense strand against b2GPI
uggugauaaaguuucuuucuu

SEQ ID NO: 934 - RNA, 21 nt, Artificial Seqence
  siRNA sense strand against b2GPI
ggugauaaaguuucuuucuuc

SEQ ID NO: 935 - RNA, 21 nt, Artificial Seqence
  siRNA sense strand against b2GPI
gugauaaaguuucuuucuucu

SEQ ID NO: 936 - RNA, 21 nt, Artificial Seqence
  siRNA sense strand against b2GPI
ugauaaaguuucuuucuucug

SEQ ID NO: 937 - RNA, 21 nt, Artificial Seqence
  siRNA sense strand against b2GPI
gauaaaguuucuuucuucugc

SEQ ID NO: 938 - RNA, 21 nt, Artificial Seqence
  siRNA sense strand against b2GPI
auaaaguuucuuucuucugca

SEQ ID NO: 939 - RNA, 21 nt, Artificial Seqence
  siRNA sense strand against b2GPI
uaaaguuucuuucuucugcaa

SEQ ID NO: 940 - RNA, 21 nt, Artificial Seqence
  siRNA sense strand against b2GPI
aaaguuucuuucuucugcaaa

SEQ ID NO: 941 - RNA, 21 nt, Artificial Seqence
  siRNA sense strand against b2GPI
aaguuucuuucuucugcaaaa

SEQ ID NO: 942 - RNA, 21 nt, Artificial Seqence
  siRNA sense strand against b2GPI
aguuucuuucuucugcaaaaa

SEQ ID NO: 943 - RNA, 21 nt, Artificial Seqence
  siRNA sense strand against b2GPI
guuucuuucuucugcaaaaau

SEQ ID NO: 944 - RNA, 21 nt, Artificial Seqence
  siRNA sense strand against b2GPI
uuucuuucuucugcaaaaaua

SEQ ID NO: 945 - RNA, 21 nt, Artificial Seqence
  siRNA sense strand against b2GPI
uucuuucuucugcaaaaauaa

SEQ ID NO: 946 - RNA, 21 nt, Artificial Seqence
  siRNA sense strand against b2GPI
ucuuucuucugcaaaaauaag

SEQ ID NO: 947 - RNA, 21 nt, Artificial Seqence
  siRNA sense strand against b2GPI
cuuucuucugcaaaaauaagg

SEQ ID NO: 948 - RNA, 21 nt, Artificial Seqence
  siRNA sense strand against b2GPI
uuucuucugcaaaaauaagga

SEQ ID NO: 949 - RNA, 21 nt, Artificial Seqence
  siRNA sense strand against b2GPI
uucuucugcaaaaauaaggaa

SEQ ID NO: 950 - RNA, 21 nt, Artificial Seqence
  siRNA sense strand against b2GPI
ucuucugcaaaaauaaggaaa

SEQ ID NO: 951 - RNA, 21 nt, Artificial Seqence
  siRNA sense strand against b2GPI
cuucugcaaaaauaaggaaaa

SEQ ID NO: 952 - RNA, 21 nt, Artificial Seqence
  siRNA sense strand against b2GPI
uucugcaaaaauaaggaaaag

SEQ ID NO: 953 - RNA, 21 nt, Artificial Seqence
  siRNA sense strand against b2GPI
ucugcaaaaauaaggaaaaga

SEQ ID NO: 954 - RNA, 21 nt, Artificial Seqence
  siRNA sense strand against b2GPI
cugcaaaaauaaggaaaagaa

SEQ ID NO: 955 - RNA, 21 nt, Artificial Seqence
  siRNA sense strand against b2GPI
ugcaaaaauaaggaaaagaag

SEQ ID NO: 956 - RNA, 21 nt, Artificial Seqence
  siRNA sense strand against b2GPI
gcaaaaauaaggaaaagaagu

SEQ ID NO: 957 - RNA, 21 nt, Artificial Seqence
  siRNA sense strand against b2GPI
caaaaauaaggaaaagaagug

SEQ ID NO: 958 - RNA, 21 nt, Artificial Seqence
  siRNA sense strand against b2GPI
aaaaauaaggaaaagaagugu

SEQ ID NO: 959 - RNA, 21 nt, Artificial Seqence
  siRNA sense strand against b2GPI
aaaauaaggaaaagaagugua

SEQ ID NO: 960 - RNA, 21 nt, Artificial Seqence
  siRNA sense strand against b2GPI
aaauaaggaaaagaaguguag

SEQ ID NO: 961 - RNA, 21 nt, Artificial Seqence
  siRNA sense strand against b2GPI
aauaaggaaaagaaguguagc

SEQ ID NO: 962 - RNA, 21 nt, Artificial Seqence
  siRNA sense strand against b2GPI
auaaggaaaagaaguguagcu

SEQ ID NO: 963 - RNA, 21 nt, Artificial Seqence
  siRNA sense strand against b2GPI
uaaggaaaagaaguguagcua

SEQ ID NO: 964 - RNA, 21 nt, Artificial Seqence
  siRNA sense strand against b2GPI
aaggaaaagaaguguagcuau

SEQ ID NO: 965 - RNA, 21 nt, Artificial Seqence
  siRNA sense strand against b2GPI
aggaaaagaaguguagcuaua

SEQ ID NO: 966 - RNA, 21 nt, Artificial Seqence
  siRNA sense strand against b2GPI
ggaaaagaaguguagcuauac

SEQ ID NO: 967 - RNA, 21 nt, Artificial Seqence
  siRNA sense strand against b2GPI
gaaaagaaguguagcuauaca

SEQ ID NO: 968 - RNA, 21 nt, Artificial Seqence
  siRNA sense strand against b2GPI
aaaagaaguguagcuauacag

SEQ ID NO: 969 - RNA, 21 nt, Artificial Seqence
  siRNA sense strand against b2GPI
aaagaaguguagcuauacaga

SEQ ID NO: 970 - RNA, 21 nt, Artificial Seqence
  siRNA sense strand against b2GPI
aagaaguguagcuauacagag

SEQ ID NO: 971 - RNA, 21 nt, Artificial Seqence
  siRNA sense strand against b2GPI
agaaguguagcuauacagagg

SEQ ID NO: 972 - RNA, 21 nt, Artificial Seqence
  siRNA sense strand against b2GPI
gaaguguagcuauacagagga

SEQ ID NO: 973 - RNA, 21 nt, Artificial Seqence
  siRNA sense strand against b2GPI
aaguguagcuauacagaggau

SEQ ID NO: 974 - RNA, 21 nt, Artificial Seqence
  siRNA sense strand against b2GPI
aguguagcuauacagaggaug

SEQ ID NO: 975 - RNA, 21 nt, Artificial Seqence
  siRNA sense strand against b2GPI
guguagcuauacagaggaugc

SEQ ID NO: 976 - RNA, 21 nt, Artificial Seqence
  siRNA sense strand against b2GPI
uguagcuauacagaggaugcu

SEQ ID NO: 977 - RNA, 21 nt, Artificial Seqence
  siRNA sense strand against b2GPI
guagcuauacagaggaugcuc

SEQ ID NO: 978 - RNA, 21 nt, Artificial Seqence
  siRNA sense strand against b2GPI
uagcuauacagaggaugcuca

SEQ ID NO: 979 - RNA, 21 nt, Artificial Seqence
  siRNA sense strand against b2GPI
agcuauacagaggaugcucag

SEQ ID NO: 980 - RNA, 21 nt, Artificial Seqence
  siRNA sense strand against b2GPI
gcuauacagaggaugcucagu

SEQ ID NO: 981 - RNA, 21 nt, Artificial Seqence
  siRNA sense strand against b2GPI
cuauacagaggaugcucagug

SEQ ID NO: 982 - RNA, 21 nt, Artificial Seqence
  siRNA sense strand against b2GPI
uauacagaggaugcucagugu

SEQ ID NO: 983 - RNA, 21 nt, Artificial Seqence
  siRNA sense strand against b2GPI
auacagaggaugcucagugua

SEQ ID NO: 984 - RNA, 21 nt, Artificial Seqence
  siRNA sense strand against b2GPI
uacagaggaugcucaguguau

SEQ ID NO: 985 - RNA, 21 nt, Artificial Seqence
  siRNA sense strand against b2GPI
acagaggaugcucaguguaua

SEQ ID NO: 986 - RNA, 21 nt, Artificial Seqence
  siRNA sense strand against b2GPI
cagaggaugcucaguguauag

SEQ ID NO: 987 - RNA, 21 nt, Artificial Seqence
  siRNA sense strand against b2GPI
agaggaugcucaguguauaga

SEQ ID NO: 988 - RNA, 21 nt, Artificial Seqence
  siRNA sense strand against b2GPI
gaggaugcucaguguauagau

SEQ ID NO: 989 - RNA, 21 nt, Artificial Seqence
  siRNA sense strand against b2GPI
aggaugcucaguguauagaug

SEQ ID NO: 990 - RNA, 21 nt, Artificial Seqence
  siRNA sense strand against b2GPI
ggaugcucaguguauagaugg

SEQ ID NO: 991 - RNA, 21 nt, Artificial Seqence
  siRNA sense strand against b2GPI
gaugcucaguguauagauggc

SEQ ID NO: 992 - RNA, 21 nt, Artificial Seqence
  siRNA sense strand against b2GPI
augcucaguguauagauggca

SEQ ID NO: 993 - RNA, 21 nt, Artificial Seqence
  siRNA sense strand against b2GPI
ugcucaguguauagauggcac

SEQ ID NO: 994 - RNA, 21 nt, Artificial Seqence
  siRNA sense strand against b2GPI
gcucaguguauagauggcacu

SEQ ID NO: 995 - RNA, 21 nt, Artificial Seqence
  siRNA sense strand against b2GPI
cucaguguauagauggcacua

SEQ ID NO: 996 - RNA, 21 nt, Artificial Seqence
  siRNA sense strand against b2GPI
ucaguguauagauggcacuau

SEQ ID NO: 997 - RNA, 21 nt, Artificial Seqence
  siRNA sense strand against b2GPI
caguguauagauggcacuauc

SEQ ID NO: 998 - RNA, 21 nt, Artificial Seqence
  siRNA sense strand against b2GPI
aguguauagauggcacuaucg

SEQ ID NO: 999 - RNA, 21 nt, Artificial Seqence
  siRNA sense strand against b2GPI
guguauagauggcacuaucga

SEQ ID NO: 1000 - RNA, 21 nt, Artificial Seqence
  siRNA sense strand against b2GPI
uguauagauggcacuaucgaa

SEQ ID NO: 1001 - RNA, 21 nt, Artificial Seqence
  siRNA sense strand against b2GPI
guauagauggcacuaucgaag

SEQ ID NO: 1002 - RNA, 21 nt, Artificial Seqence
  siRNA sense strand against b2GPI
uauagauggcacuaucgaagu

SEQ ID NO: 1003 - RNA, 21 nt, Artificial Seqence
  siRNA sense strand against b2GPI
auagauggcacuaucgaaguc

SEQ ID NO: 1004 - RNA, 21 nt, Artificial Seqence
  siRNA sense strand against b2GPI
uagauggcacuaucgaagucc

SEQ ID NO: 1005 - RNA, 21 nt, Artificial Seqence
  siRNA sense strand against b2GPI
agauggcacuaucgaaguccc

SEQ ID NO: 1006 - RNA, 21 nt, Artificial Seqence
  siRNA sense strand against b2GPI
gauggcacuaucgaagucccc

SEQ ID NO: 1007 - RNA, 21 nt, Artificial Seqence
  siRNA sense strand against b2GPI
auggcacuaucgaagucccca

SEQ ID NO: 1008 - RNA, 21 nt, Artificial Seqence
  siRNA sense strand against b2GPI
uggcacuaucgaaguccccaa

SEQ ID NO: 1009 - RNA, 21 nt, Artificial Seqence
  siRNA sense strand against b2GPI
ggcacuaucgaaguccccaaa

SEQ ID NO: 1010 - RNA, 21 nt, Artificial Seqence
  siRNA sense strand against b2GPI
gcacuaucgaaguccccaaau

SEQ ID NO: 1011 - RNA, 21 nt, Artificial Seqence
  siRNA sense strand against b2GPI
cacuaucgaaguccccaaaug

SEQ ID NO: 1012 - RNA, 21 nt, Artificial Seqence
  siRNA sense strand against b2GPI
acuaucgaaguccccaaaugc

SEQ ID NO: 1013 - RNA, 21 nt, Artificial Seqence
  siRNA sense strand against b2GPI
cuaucgaaguccccaaaugcu

SEQ ID NO: 1014 - RNA, 21 nt, Artificial Seqence
  siRNA sense strand against b2GPI
uaucgaaguccccaaaugcuu

SEQ ID NO: 1015 - RNA, 21 nt, Artificial Seqence
  siRNA sense strand against b2GPI
aucgaaguccccaaaugcuuc

SEQ ID NO: 1016 - RNA, 21 nt, Artificial Seqence
  siRNA sense strand against b2GPI
ucgaaguccccaaaugcuuca

SEQ ID NO: 1017 - RNA, 21 nt, Artificial Seqence
  siRNA sense strand against b2GPI
cgaaguccccaaaugcuucaa

SEQ ID NO: 1018 - RNA, 21 nt, Artificial Seqence
  siRNA sense strand against b2GPI
gaaguccccaaaugcuucaag

SEQ ID NO: 1019 - RNA, 21 nt, Artificial Seqence
  siRNA sense strand against b2GPI
aaguccccaaaugcuucaagg

SEQ ID NO: 1020 - RNA, 21 nt, Artificial Seqence
  siRNA sense strand against b2GPI
aguccccaaaugcuucaagga

SEQ ID NO: 1021 - RNA, 21 nt, Artificial Seqence
  siRNA sense strand against b2GPI
guccccaaaugcuucaaggaa

SEQ ID NO: 1022 - RNA, 21 nt, Artificial Seqence
  siRNA sense strand against b2GPI
uccccaaaugcuucaaggaac

SEQ ID NO: 1023 - RNA, 21 nt, Artificial Seqence
  siRNA sense strand against b2GPI
ccccaaaugcuucaaggaaca

SEQ ID NO: 1024 - RNA, 21 nt, Artificial Seqence
  siRNA sense strand against b2GPI
cccaaaugcuucaaggaacac

SEQ ID NO: 1025 - RNA, 21 nt, Artificial Seqence
  siRNA sense strand against b2GPI
ccaaaugcuucaaggaacaca

SEQ ID NO: 1026 - RNA, 21 nt, Artificial Seqence
  siRNA sense strand against b2GPI
caaaugcuucaaggaacacag

SEQ ID NO: 1027 - RNA, 21 nt, Artificial Seqence
  siRNA sense strand against b2GPI
aaaugcuucaaggaacacagu

SEQ ID NO: 1028 - RNA, 21 nt, Artificial Seqence
  siRNA sense strand against b2GPI
aaugcuucaaggaacacaguu

SEQ ID NO: 1029 - RNA, 21 nt, Artificial Seqence
  siRNA sense strand against b2GPI
augcuucaaggaacacaguuc

SEQ ID NO: 1030 - RNA, 21 nt, Artificial Seqence
  siRNA sense strand against b2GPI
ugcuucaaggaacacaguucu

SEQ ID NO: 1031 - RNA, 21 nt, Artificial Seqence
  siRNA sense strand against b2GPI
gcuucaaggaacacaguucuc

SEQ ID NO: 1032 - RNA, 21 nt, Artificial Seqence
  siRNA sense strand against b2GPI
cuucaaggaacacaguucucu

SEQ ID NO: 1033 - RNA, 21 nt, Artificial Seqence
  siRNA sense strand against b2GPI
uucaaggaacacaguucucug

SEQ ID NO: 1034 - RNA, 21 nt, Artificial Seqence
  siRNA sense strand against b2GPI
ucaaggaacacaguucucugg

SEQ ID NO: 1035 - RNA, 21 nt, Artificial Seqence
  siRNA sense strand against b2GPI
caaggaacacaguucucuggc

SEQ ID NO: 1036 - RNA, 21 nt, Artificial Seqence
  siRNA sense strand against b2GPI
aaggaacacaguucucuggcu

SEQ ID NO: 1037 - RNA, 21 nt, Artificial Seqence
  siRNA sense strand against b2GPI
aggaacacaguucucuggcuu

SEQ ID NO: 1038 - RNA, 21 nt, Artificial Seqence
  siRNA sense strand against b2GPI
ggaacacaguucucuggcuuu

SEQ ID NO: 1039 - RNA, 21 nt, Artificial Seqence
  siRNA sense strand against b2GPI
gaacacaguucucuggcuuuu

SEQ ID NO: 1040 - RNA, 21 nt, Artificial Seqence
  siRNA sense strand against b2GPI
aacacaguucucuggcuuuuu

SEQ ID NO: 1041 - RNA, 21 nt, Artificial Seqence
  siRNA sense strand against b2GPI
acacaguucucuggcuuuuug

SEQ ID NO: 1042 - RNA, 21 nt, Artificial Seqence
  siRNA sense strand against b2GPI
cacaguucucuggcuuuuugg

SEQ ID NO: 1043 - RNA, 21 nt, Artificial Seqence
  siRNA sense strand against b2GPI
acaguucucuggcuuuuugga

SEQ ID NO: 1044 - RNA, 21 nt, Artificial Seqence
  siRNA sense strand against b2GPI
caguucucuggcuuuuuggaa

SEQ ID NO: 1045 - RNA, 21 nt, Artificial Seqence
  siRNA sense strand against b2GPI
aguucucuggcuuuuuggaaa

SEQ ID NO: 1046 - RNA, 21 nt, Artificial Seqence
  siRNA sense strand against b2GPI
guucucuggcuuuuuggaaaa

SEQ ID NO: 1047 - RNA, 21 nt, Artificial Seqence
  siRNA sense strand against b2GPI
uucucuggcuuuuuggaaaac

SEQ ID NO: 1048 - RNA, 21 nt, Artificial Seqence
  siRNA sense strand against b2GPI
ucucuggcuuuuuggaaaacu

SEQ ID NO: 1049 - RNA, 21 nt, Artificial Seqence
  siRNA sense strand against b2GPI
cucuggcuuuuuggaaaacug

SEQ ID NO: 1050 - RNA, 21 nt, Artificial Seqence
  siRNA sense strand against b2GPI
ucuggcuuuuuggaaaacuga

SEQ ID NO: 1051 - RNA, 21 nt, Artificial Seqence
  siRNA sense strand against b2GPI
cuggcuuuuuggaaaacugau

SEQ ID NO: 1052 - RNA, 21 nt, Artificial Seqence
  siRNA sense strand against b2GPI
uggcuuuuuggaaaacugaug

SEQ ID NO: 1053 - RNA, 21 nt, Artificial Seqence
  siRNA sense strand against b2GPI
ggcuuuuuggaaaacugaugc

SEQ ID NO: 1054 - RNA, 21 nt, Artificial Seqence
  siRNA sense strand against b2GPI
gcuuuuuggaaaacugaugca

SEQ ID NO: 1055 - RNA, 21 nt, Artificial Seqence
  siRNA sense strand against b2GPI
cuuuuuggaaaacugaugcau

SEQ ID NO: 1056 - RNA, 21 nt, Artificial Seqence
  siRNA sense strand against b2GPI
uuuuuggaaaacugaugcauc

SEQ ID NO: 1057 - RNA, 21 nt, Artificial Seqence
  siRNA sense strand against b2GPI
uuuuggaaaacugaugcaucc

SEQ ID NO: 1058 - RNA, 21 nt, Artificial Seqence
  siRNA sense strand against b2GPI
uuuggaaaacugaugcauccg

SEQ ID NO: 1059 - RNA, 21 nt, Artificial Seqence
  siRNA sense strand against b2GPI
uuggaaaacugaugcauccga

SEQ ID NO: 1060 - RNA, 21 nt, Artificial Seqence
  siRNA sense strand against b2GPI
uggaaaacugaugcauccgau

SEQ ID NO: 1061 - RNA, 21 nt, Artificial Seqence
  siRNA sense strand against b2GPI
ggaaaacugaugcauccgaug

SEQ ID NO: 1062 - RNA, 21 nt, Artificial Seqence
  siRNA sense strand against b2GPI
gaaaacugaugcauccgaugu

SEQ ID NO: 1063 - RNA, 21 nt, Artificial Seqence
  siRNA sense strand against b2GPI
aaaacugaugcauccgaugua

SEQ ID NO: 1064 - RNA, 21 nt, Artificial Seqence
  siRNA sense strand against b2GPI
aaacugaugcauccgauguaa

SEQ ID NO: 1065 - RNA, 21 nt, Artificial Seqence
  siRNA sense strand against b2GPI
aacugaugcauccgauguaaa

SEQ ID NO: 1066 - RNA, 21 nt, Artificial Seqence
  siRNA sense strand against b2GPI
acugaugcauccgauguaaag

SEQ ID NO: 1067 - RNA, 21 nt, Artificial Seqence
  siRNA sense strand against b2GPI
cugaugcauccgauguaaagc

SEQ ID NO: 1068 - RNA, 21 nt, Artificial Seqence
  siRNA sense strand against b2GPI
ugaugcauccgauguaaagcc

SEQ ID NO: 1069 - RNA, 21 nt, Artificial Seqence
  siRNA sense strand against b2GPI
gaugcauccgauguaaagcca

SEQ ID NO: 1070 - RNA, 21 nt, Artificial Seqence
  siRNA sense strand against b2GPI
augcauccgauguaaagccau

SEQ ID NO: 1071 - RNA, 21 nt, Artificial Seqence
  siRNA sense strand against b2GPI
ugcauccgauguaaagccaug

SEQ ID NO: 1072 - RNA, 21 nt, Artificial Seqence
  siRNA sense strand against b2GPI
gcauccgauguaaagccaugc

SEQ ID NO: 1073 - RNA, 21 nt, Artificial Seqence
  siRNA sense strand against b2GPI
cauccgauguaaagccaugcu

SEQ ID NO: 1074 - RNA, 21 nt, Artificial Seqence
  siRNA sense strand against b2GPI
auccgauguaaagccaugcua

SEQ ID NO: 1075 - RNA, 21 nt, Artificial Seqence
  siRNA sense strand against b2GPI
uccgauguaaagccaugcuaa

SEQ ID NO: 1076 - RNA, 21 nt, Artificial Seqence
  siRNA sense strand against b2GPI
ccgauguaaagccaugcuaag

SEQ ID NO: 1077 - RNA, 21 nt, Artificial Seqence
  siRNA sense strand against b2GPI
cgauguaaagccaugcuaagg

SEQ ID NO: 1078 - RNA, 21 nt, Artificial Seqence
  siRNA sense strand against b2GPI
gauguaaagccaugcuaaggu

SEQ ID NO: 1079 - RNA, 21 nt, Artificial Seqence
  siRNA sense strand against b2GPI
auguaaagccaugcuaaggug

SEQ ID NO: 1080 - RNA, 21 nt, Artificial Seqence
  siRNA sense strand against b2GPI
uguaaagccaugcuaaggugg

SEQ ID NO: 1081 - RNA, 21 nt, Artificial Seqence
  siRNA sense strand against b2GPI
guaaagccaugcuaagguggu

SEQ ID NO: 1082 - RNA, 21 nt, Artificial Seqence
  siRNA sense strand against b2GPI
uaaagccaugcuaaggugguu

SEQ ID NO: 1083 - RNA, 21 nt, Artificial Seqence
  siRNA sense strand against b2GPI
aaagccaugcuaaggugguuu

SEQ ID NO: 1084 - RNA, 21 nt, Artificial Seqence
  siRNA sense strand against b2GPI
aagccaugcuaaggugguuuu

SEQ ID NO: 1085 - RNA, 21 nt, Artificial Seqence
  siRNA sense strand against b2GPI
agccaugcuaaggugguuuuc

SEQ ID NO: 1086 - RNA, 21 nt, Artificial Seqence
  siRNA sense strand against b2GPI
gccaugcuaaggugguuuuca

SEQ ID NO: 1087 - RNA, 21 nt, Artificial Seqence
  siRNA sense strand against b2GPI
ccaugcuaaggugguuuucag

SEQ ID NO: 1088 - RNA, 21 nt, Artificial Seqence
  siRNA sense strand against b2GPI
caugcuaaggugguuuucaga

SEQ ID NO: 1089 - RNA, 21 nt, Artificial Seqence
  siRNA sense strand against b2GPI
augcuaaggugguuuucagau

SEQ ID NO: 1090 - RNA, 21 nt, Artificial Seqence
  siRNA sense strand against b2GPI
ugcuaaggugguuuucagauu

SEQ ID NO: 1091 - RNA, 21 nt, Artificial Seqence
  siRNA sense strand against b2GPI
gcuaaggugguuuucagauuc

SEQ ID NO: 1092 - RNA, 21 nt, Artificial Seqence
  siRNA sense strand against b2GPI
cuaaggugguuuucagauucc

SEQ ID NO: 1093 - RNA, 21 nt, Artificial Seqence
  siRNA sense strand against b2GPI
uaaggugguuuucagauucca

SEQ ID NO: 1094 - RNA, 21 nt, Artificial Seqence
  siRNA sense strand against b2GPI
aaggugguuuucagauuccac

SEQ ID NO: 1095 - RNA, 21 nt, Artificial Seqence
  siRNA sense strand against b2GPI
aggugguuuucagauuccaca

SEQ ID NO: 1096 - RNA, 21 nt, Artificial Seqence
  siRNA sense strand against b2GPI
ggugguuuucagauuccacac

SEQ ID NO: 1097 - RNA, 21 nt, Artificial Seqence
  siRNA sense strand against b2GPI
gugguuuucagauuccacaca

SEQ ID NO: 1098 - RNA, 21 nt, Artificial Seqence
  siRNA sense strand against b2GPI
ugguuuucagauuccacacaa

SEQ ID NO: 1099 - RNA, 21 nt, Artificial Seqence
  siRNA sense strand against b2GPI
gguuuucagauuccacacaaa

SEQ ID NO: 1100 - RNA, 21 nt, Artificial Seqence
  siRNA sense strand against b2GPI
guuuucagauuccacacaaaa

SEQ ID NO: 1101 - RNA, 21 nt, Artificial Seqence
  siRNA sense strand against b2GPI
uuuucagauuccacacaaaau

SEQ ID NO: 1102 - RNA, 21 nt, Artificial Seqence
  siRNA sense strand against b2GPI
uuucagauuccacacaaaaug

SEQ ID NO: 1103 - RNA, 21 nt, Artificial Seqence
  siRNA sense strand against b2GPI
uucagauuccacacaaaaugu

SEQ ID NO: 1104 - RNA, 21 nt, Artificial Seqence
  siRNA sense strand against b2GPI
ucagauuccacacaaaauguc

SEQ ID NO: 1105 - RNA, 21 nt, Artificial Seqence
  siRNA sense strand against b2GPI
cagauuccacacaaaauguca

SEQ ID NO: 1106 - RNA, 21 nt, Artificial Seqence
  siRNA sense strand against b2GPI
agauuccacacaaaaugucac

SEQ ID NO: 1107 - RNA, 21 nt, Artificial Seqence
  siRNA sense strand against b2GPI
gauuccacacaaaaugucaca

SEQ ID NO: 1108 - RNA, 21 nt, Artificial Seqence
  siRNA sense strand against b2GPI
auuccacacaaaaugucacac

SEQ ID NO: 1109 - RNA, 21 nt, Artificial Seqence
  siRNA sense strand against b2GPI
uuccacacaaaaugucacacu

SEQ ID NO: 1110 - RNA, 21 nt, Artificial Seqence
  siRNA sense strand against b2GPI
uccacacaaaaugucacacuu

SEQ ID NO: 1111 - RNA, 21 nt, Artificial Seqence
  siRNA sense strand against b2GPI
ccacacaaaaugucacacuug

SEQ ID NO: 1112 - RNA, 21 nt, Artificial Seqence
  siRNA sense strand against b2GPI
cacacaaaaugucacacuugu

SEQ ID NO: 1113 - RNA, 21 nt, Artificial Seqence
  siRNA sense strand against b2GPI
acacaaaaugucacacuuguu

SEQ ID NO: 1114 - RNA, 21 nt, Artificial Seqence
  siRNA sense strand against b2GPI
cacaaaaugucacacuuguuu

SEQ ID NO: 1115 - RNA, 21 nt, Artificial Seqence
  siRNA sense strand against b2GPI
acaaaaugucacacuuguuuc

SEQ ID NO: 1116 - RNA, 21 nt, Artificial Seqence
  siRNA sense strand against b2GPI
caaaaugucacacuuguuucu

SEQ ID NO: 1117 - RNA, 21 nt, Artificial Seqence
  siRNA sense strand against b2GPI
aaaaugucacacuuguuucuu

SEQ ID NO: 1118 - RNA, 21 nt, Artificial Seqence
  siRNA sense strand against b2GPI
aaaugucacacuuguuucuug

SEQ ID NO: 1119 - RNA, 21 nt, Artificial Seqence
  siRNA sense strand against b2GPI
aaugucacacuuguuucuugu

SEQ ID NO: 1120 - RNA, 21 nt, Artificial Seqence
  siRNA sense strand against b2GPI
augucacacuuguuucuuguu

SEQ ID NO: 1121 - RNA, 21 nt, Artificial Seqence
  siRNA sense strand against b2GPI
ugucacacuuguuucuuguuc

SEQ ID NO: 1122 - RNA, 21 nt, Artificial Seqence
  siRNA sense strand against b2GPI
gucacacuuguuucuuguuca

SEQ ID NO: 1123 - RNA, 21 nt, Artificial Seqence
  siRNA sense strand against b2GPI
ucacacuuguuucuuguucau

SEQ ID NO: 1124 - RNA, 21 nt, Artificial Seqence
  siRNA sense strand against b2GPI
cacacuuguuucuuguucauc

SEQ ID NO: 1125 - RNA, 21 nt, Artificial Seqence
  siRNA sense strand against b2GPI
acacuuguuucuuguucaucc

SEQ ID NO: 1126 - RNA, 21 nt, Artificial Seqence
  siRNA sense strand against b2GPI
cacuuguuucuuguucaucca

SEQ ID NO: 1127 - RNA, 21 nt, Artificial Seqence
  siRNA sense strand against b2GPI
acuuguuucuuguucauccaa

SEQ ID NO: 1128 - RNA, 21 nt, Artificial Seqence
  siRNA sense strand against b2GPI
cuuguuucuuguucauccaag

SEQ ID NO: 1129 - RNA, 21 nt, Artificial Seqence
  siRNA sense strand against b2GPI
uuguuucuuguucauccaagg

SEQ ID NO: 1130 - RNA, 21 nt, Artificial Seqence
  siRNA sense strand against b2GPI
uguuucuuguucauccaagga

SEQ ID NO: 1131 - RNA, 21 nt, Artificial Seqence
  siRNA sense strand against b2GPI
guuucuuguucauccaaggaa

SEQ ID NO: 1132 - RNA, 21 nt, Artificial Seqence
  siRNA sense strand against b2GPI
uuucuuguucauccaaggaac

SEQ ID NO: 1133 - RNA, 21 nt, Artificial Seqence
  siRNA sense strand against b2GPI
uucuuguucauccaaggaacc

SEQ ID NO: 1134 - RNA, 21 nt, Artificial Seqence
  siRNA sense strand against b2GPI
ucuuguucauccaaggaaccu

SEQ ID NO: 1135 - RNA, 21 nt, Artificial Seqence
  siRNA sense strand against b2GPI
cuuguucauccaaggaaccua

SEQ ID NO: 1136 - RNA, 21 nt, Artificial Seqence
  siRNA sense strand against b2GPI
uuguucauccaaggaaccuaa

SEQ ID NO: 1137 - RNA, 21 nt, Artificial Seqence
  siRNA sense strand against b2GPI
uguucauccaaggaaccuaau

SEQ ID NO: 1138 - RNA, 21 nt, Artificial Seqence
  siRNA sense strand against b2GPI
guucauccaaggaaccuaauu

SEQ ID NO: 1139 - RNA, 21 nt, Artificial Seqence
  siRNA sense strand against b2GPI
uucauccaaggaaccuaauug

SEQ ID NO: 1140 - RNA, 21 nt, Artificial Seqence
  siRNA sense strand against b2GPI
ucauccaaggaaccuaauuga

SEQ ID NO: 1141 - RNA, 21 nt, Artificial Seqence
  siRNA sense strand against b2GPI
cauccaaggaaccuaauugaa

SEQ ID NO: 1142 - RNA, 21 nt, Artificial Seqence
  siRNA sense strand against b2GPI
auccaaggaaccuaauugaaa

SEQ ID NO: 1143 - RNA, 21 nt, Artificial Seqence
  siRNA sense strand against b2GPI
uccaaggaaccuaauugaaau

SEQ ID NO: 1144 - RNA, 21 nt, Artificial Seqence
  siRNA sense strand against b2GPI
ccaaggaaccuaauugaaauu

SEQ ID NO: 1145 - RNA, 21 nt, Artificial Seqence
  siRNA sense strand against b2GPI
caaggaaccuaauugaaauuu

SEQ ID NO: 1146 - RNA, 21 nt, Artificial Seqence
  siRNA sense strand against b2GPI
aaggaaccuaauugaaauuua

SEQ ID NO: 1147 - RNA, 21 nt, Artificial Seqence
  siRNA sense strand against b2GPI
aggaaccuaauugaaauuuaa

SEQ ID NO: 1148 - RNA, 21 nt, Artificial Seqence
  siRNA sense strand against b2GPI
ggaaccuaauugaaauuuaaa

SEQ ID NO: 1149 - RNA, 21 nt, Artificial Seqence
  siRNA sense strand against b2GPI
gaaccuaauugaaauuuaaaa

SEQ ID NO: 1150 - RNA, 21 nt, Artificial Seqence
  siRNA sense strand against b2GPI
aaccuaauugaaauuuaaaaa

SEQ ID NO: 1151 - RNA, 21 nt, Artificial Seqence
  siRNA sense strand against b2GPI
accuaauugaaauuuaaaaau

SEQ ID NO: 1152 - RNA, 21 nt, Artificial Seqence
  siRNA sense strand against b2GPI
ccuaauugaaauuuaaaaaua

SEQ ID NO: 1153 - RNA, 21 nt, Artificial Seqence
  siRNA sense strand against b2GPI
cuaauugaaauuuaaaaauaa

SEQ ID NO: 1154 - RNA, 21 nt, Artificial Seqence
  siRNA sense strand against b2GPI
uaauugaaauuuaaaaauaaa

SEQ ID NO: 1155 - RNA, 21 nt, Artificial Seqence
  siRNA sense strand against b2GPI
aauugaaauuuaaaaauaaag

SEQ ID NO: 1156 - RNA, 21 nt, Artificial Seqence
  siRNA sense strand against b2GPI
auugaaauuuaaaaauaaagc

SEQ ID NO: 1157 - RNA, 21 nt, Artificial Seqence
  siRNA sense strand against b2GPI
uugaaauuuaaaaauaaagcu

SEQ ID NO: 1158 - RNA, 21 nt, Artificial Seqence
  siRNA sense strand against b2GPI
ugaaauuuaaaaauaaagcua

SEQ ID NO: 1159 - RNA, 21 nt, Artificial Seqence
  siRNA sense strand against b2GPI
gaaauuuaaaaauaaagcuac

SEQ ID NO: 1160 - RNA, 21 nt, Artificial Seqence
  siRNA sense strand against b2GPI
aaauuuaaaaauaaagcuacu

SEQ ID NO: 1161 - RNA, 21 nt, Artificial Seqence
  siRNA sense strand against b2GPI
aauuuaaaaauaaagcuacug

SEQ ID NO: 1162 - RNA, 21 nt, Artificial Seqence
  siRNA sense strand against b2GPI
auuuaaaaauaaagcuacuga

SEQ ID NO: 1163 - RNA, 21 nt, Artificial Seqence
  siRNA sense strand against b2GPI
uuuaaaaauaaagcuacugaa

SEQ ID NO: 1164 - RNA, 21 nt, Artificial Seqence
  siRNA sense strand against b2GPI
uuaaaaauaaagcuacugaau

SEQ ID NO: 1165 - RNA, 21 nt, Artificial Seqence
  siRNA sense strand against b2GPI
uaaaaauaaagcuacugaauu

SEQ ID NO: 1166 - RNA, 21 nt, Artificial Seqence
  siRNA sense strand against b2GPI
aaaaauaaagcuacugaauuu

SEQ ID NO: 1167 - RNA, 21 nt, Artificial Seqence
  siRNA sense strand against b2GPI
aaaauaaagcuacugaauuua

SEQ ID NO: 1168 - RNA, 21 nt, Artificial Seqence
  siRNA sense strand against b2GPI
aaauaaagcuacugaauuuau

SEQ ID NO: 1169 - RNA, 21 nt, Artificial Seqence
  siRNA sense strand against b2GPI
aauaaagcuacugaauuuauu

SEQ ID NO: 1170 - RNA, 21 nt, Artificial Seqence
  siRNA sense strand against b2GPI
auaaagcuacugaauuuauug

SEQ ID NO: 1171 - RNA, 21 nt, Artificial Seqence
  siRNA sense strand against b2GPI
uaaagcuacugaauuuauugc

SEQ ID NO: 1172 - RNA, 21 nt, Artificial Seqence
  siRNA sense strand against b2GPI
aaagcuacugaauuuauugcc

SEQ ID NO: 1173 - RNA, 21 nt, Artificial Seqence
  siRNA sense strand against b2GPI
aagcuacugaauuuauugccg

SEQ ID NO: 1174 - RNA, 21 nt, Artificial Seqence
  siRNA sense strand against b2GPI
agcuacugaauuuauugccgc

SEQ ID NO: 1175 - RNA, 21 nt, Artificial Seqence
  siRNA sense strand against b2GPI
gcuacugaauuuauugccgca

SEQ ID NO: 1176 - RNA, 21 nt, Artificial Seqence
  siRNA sense strand against b2GPI
cuacugaauuuauugccgcac

SEQ ID NO: 1177 - RNA, 21 nt, Artificial Seqence
  siRNA sense strand against b2GPI
uacugaauuuauugccgcacc

SEQ ID NO: 1178 - RNA, 21 nt, Artificial Seqence
  siRNA sense strand against b2GPI
acugaauuuauugccgcaccc

SEQ ID NO: 1179 - RNA, 21 nt, Artificial Seqence
  siRNA sense strand against b2GPI
cugaauuuauugccgcaccca

SEQ ID NO: 1180 - RNA, 21 nt, Artificial Seqence
  siRNA sense strand against b2GPI
ugaauuuauugccgcacccaa

SEQ ID NO: 1181 - RNA, 21 nt, Artificial Seqence
  siRNA antisense strand against b2GPI
gucugcuaaaaagacagagcc

SEQ ID NO: 1182 - RNA, 21 nt, Artificial Seqence
  siRNA antisense strand against b2GPI
cgucugcuaaaaagacagagc

SEQ ID NO: 1183 - RNA, 21 nt, Artificial Seqence
  siRNA antisense strand against b2GPI
ucgucugcuaaaaagacagag

SEQ ID NO: 1184 - RNA, 21 nt, Artificial Seqence
  siRNA antisense strand against b2GPI
uucgucugcuaaaaagacaga

SEQ ID NO: 1185 - RNA, 21 nt, Artificial Seqence
  siRNA antisense strand against b2GPI
uuucgucugcuaaaaagacag

SEQ ID NO: 1186 - RNA, 21 nt, Artificial Seqence
  siRNA antisense strand against b2GPI
uuuucgucugcuaaaaagaca

SEQ ID NO: 1187 - RNA, 21 nt, Artificial Seqence
  siRNA antisense strand against b2GPI
guuuucgucugcuaaaaagac

SEQ ID NO: 1188 - RNA, 21 nt, Artificial Seqence
  siRNA antisense strand against b2GPI
gguuuucgucugcuaaaaaga

SEQ ID NO: 1189 - RNA, 21 nt, Artificial Seqence
  siRNA antisense strand against b2GPI
ugguuuucgucugcuaaaaag

SEQ ID NO: 1190 - RNA, 21 nt, Artificial Seqence
  siRNA antisense strand against b2GPI
gugguuuucgucugcuaaaaa

SEQ ID NO: 1191 - RNA, 21 nt, Artificial Seqence
  siRNA antisense strand against b2GPI
agugguuuucgucugcuaaaa

SEQ ID NO: 1192 - RNA, 21 nt, Artificial Seqence
  siRNA antisense strand against b2GPI
aagugguuuucgucugcuaaa

SEQ ID NO: 1193 - RNA, 21 nt, Artificial Seqence
  siRNA antisense strand against b2GPI
aaagugguuuucgucugcuaa

SEQ ID NO: 1194 - RNA, 21 nt, Artificial Seqence
  siRNA antisense strand against b2GPI
caaagugguuuucgucugcua

SEQ ID NO: 1195 - RNA, 21 nt, Artificial Seqence
  siRNA antisense strand against b2GPI
ccaaagugguuuucgucugcu

SEQ ID NO: 1196 - RNA, 21 nt, Artificial Seqence
  siRNA antisense strand against b2GPI
accaaagugguuuucgucugc

SEQ ID NO: 1197 - RNA, 21 nt, Artificial Seqence
  siRNA antisense strand against b2GPI
uaccaaagugguuuucgucug

SEQ ID NO: 1198 - RNA, 21 nt, Artificial Seqence
  siRNA antisense strand against b2GPI
cuaccaaagugguuuucgucu

SEQ ID NO: 1199 - RNA, 21 nt, Artificial Seqence
  siRNA antisense strand against b2GPI
acuaccaaagugguuuucguc

SEQ ID NO: 1200 - RNA, 21 nt, Artificial Seqence
  siRNA antisense strand against b2GPI
cacuaccaaagugguuuucgu

SEQ ID NO: 1201 - RNA, 21 nt, Artificial Seqence
  siRNA antisense strand against b2GPI
gcacuaccaaagugguuuucg

SEQ ID NO: 1202 - RNA, 21 nt, Artificial Seqence
  siRNA antisense strand against b2GPI
ggcacuaccaaagugguuuuc

SEQ ID NO: 1203 - RNA, 21 nt, Artificial Seqence
  siRNA antisense strand against b2GPI
uggcacuaccaaagugguuuu

SEQ ID NO: 1204 - RNA, 21 nt, Artificial Seqence
  siRNA antisense strand against b2GPI
cuggcacuaccaaagugguuu

SEQ ID NO: 1205 - RNA, 21 nt, Artificial Seqence
  siRNA antisense strand against b2GPI
acuggcacuaccaaagugguu

SEQ ID NO: 1206 - RNA, 21 nt, Artificial Seqence
  siRNA antisense strand against b2GPI
cacuggcacuaccaaaguggu

SEQ ID NO: 1207 - RNA, 21 nt, Artificial Seqence
  siRNA antisense strand against b2GPI
acacuggcacuaccaaagugg

SEQ ID NO: 1208 - RNA, 21 nt, Artificial Seqence
  siRNA antisense strand against b2GPI
cacacuggcacuaccaaagug

SEQ ID NO: 1209 - RNA, 21 nt, Artificial Seqence
  siRNA antisense strand against b2GPI
ucacacuggcacuaccaaagu

SEQ ID NO: 1210 - RNA, 21 nt, Artificial Seqence
  siRNA antisense strand against b2GPI
gucacacuggcacuaccaaag

SEQ ID NO: 1211 - RNA, 21 nt, Artificial Seqence
  siRNA antisense strand against b2GPI
agucacacuggcacuaccaaa

SEQ ID NO: 1212 - RNA, 21 nt, Artificial Seqence
  siRNA antisense strand against b2GPI
gagucacacuggcacuaccaa

SEQ ID NO: 1213 - RNA, 21 nt, Artificial Seqence
  siRNA antisense strand against b2GPI
ugagucacacuggcacuacca

SEQ ID NO: 1214 - RNA, 21 nt, Artificial Seqence
  siRNA antisense strand against b2GPI
augagucacacuggcacuacc

SEQ ID NO: 1215 - RNA, 21 nt, Artificial Seqence
  siRNA antisense strand against b2GPI
gaugagucacacuggcacuac

SEQ ID NO: 1216 - RNA, 21 nt, Artificial Seqence
  siRNA antisense strand against b2GPI
ggaugagucacacuggcacua

SEQ ID NO: 1217 - RNA, 21 nt, Artificial Seqence
  siRNA antisense strand against b2GPI
uggaugagucacacuggcacu

SEQ ID NO: 1218 - RNA, 21 nt, Artificial Seqence
  siRNA antisense strand against b2GPI
guggaugagucacacuggcac

SEQ ID NO: 1219 - RNA, 21 nt, Artificial Seqence
  siRNA antisense strand against b2GPI
uguggaugagucacacuggca

SEQ ID NO: 1220 - RNA, 21 nt, Artificial Seqence
  siRNA antisense strand against b2GPI
uuguggaugagucacacuggc

SEQ ID NO: 1221 - RNA, 21 nt, Artificial Seqence
  siRNA antisense strand against b2GPI
auuguggaugagucacacugg

SEQ ID NO: 1222 - RNA, 21 nt, Artificial Seqence
  siRNA antisense strand against b2GPI
cauuguggaugagucacacug

SEQ ID NO: 1223 - RNA, 21 nt, Artificial Seqence
  siRNA antisense strand against b2GPI
ucauuguggaugagucacacu

SEQ ID NO: 1224 - RNA, 21 nt, Artificial Seqence
  siRNA antisense strand against b2GPI
aucauuguggaugagucacac

SEQ ID NO: 1225 - RNA, 21 nt, Artificial Seqence
  siRNA antisense strand against b2GPI
aaucauuguggaugagucaca

SEQ ID NO: 1226 - RNA, 21 nt, Artificial Seqence
  siRNA antisense strand against b2GPI
aaaucauuguggaugagucac

SEQ ID NO: 1227 - RNA, 21 nt, Artificial Seqence
  siRNA antisense strand against b2GPI
gaaaucauuguggaugaguca

SEQ ID NO: 1228 - RNA, 21 nt, Artificial Seqence
  siRNA antisense strand against b2GPI
agaaaucauuguggaugaguc

SEQ ID NO: 1229 - RNA, 21 nt, Artificial Seqence
  siRNA antisense strand against b2GPI
gagaaaucauuguggaugagu

SEQ ID NO: 1230 - RNA, 21 nt, Artificial Seqence
  siRNA antisense strand against b2GPI
ggagaaaucauuguggaugag

SEQ ID NO: 1231 - RNA, 21 nt, Artificial Seqence
  siRNA antisense strand against b2GPI
uggagaaaucauuguggauga

SEQ ID NO: 1232 - RNA, 21 nt, Artificial Seqence
  siRNA antisense strand against b2GPI
cuggagaaaucauuguggaug

SEQ ID NO: 1233 - RNA, 21 nt, Artificial Seqence
  siRNA antisense strand against b2GPI
acuggagaaaucauuguggau

SEQ ID NO: 1234 - RNA, 21 nt, Artificial Seqence
  siRNA antisense strand against b2GPI
cacuggagaaaucauugugga

SEQ ID NO: 1235 - RNA, 21 nt, Artificial Seqence
  siRNA antisense strand against b2GPI
gcacuggagaaaucauugugg

SEQ ID NO: 1236 - RNA, 21 nt, Artificial Seqence
  siRNA antisense strand against b2GPI
agcacuggagaaaucauugug

SEQ ID NO: 1237 - RNA, 21 nt, Artificial Seqence
  siRNA antisense strand against b2GPI
gagcacuggagaaaucauugu

SEQ ID NO: 1238 - RNA, 21 nt, Artificial Seqence
  siRNA antisense strand against b2GPI
ugagcacuggagaaaucauug

SEQ ID NO: 1239 - RNA, 21 nt, Artificial Seqence
  siRNA antisense strand against b2GPI
augagcacuggagaaaucauu

SEQ ID NO: 1240 - RNA, 21 nt, Artificial Seqence
  siRNA antisense strand against b2GPI
gaugagcacuggagaaaucau

SEQ ID NO: 1241 - RNA, 21 nt, Artificial Seqence
  siRNA antisense strand against b2GPI
agaugagcacuggagaaauca

SEQ ID NO: 1242 - RNA, 21 nt, Artificial Seqence
  siRNA antisense strand against b2GPI
aagaugagcacuggagaaauc

SEQ ID NO: 1243 - RNA, 21 nt, Artificial Seqence
  siRNA antisense strand against b2GPI
caagaugagcacuggagaaau

SEQ ID NO: 1244 - RNA, 21 nt, Artificial Seqence
  siRNA antisense strand against b2GPI
acaagaugagcacuggagaaa

SEQ ID NO: 1245 - RNA, 21 nt, Artificial Seqence
  siRNA antisense strand against b2GPI
aacaagaugagcacuggagaa

SEQ ID NO: 1246 - RNA, 21 nt, Artificial Seqence
  siRNA antisense strand against b2GPI
gaacaagaugagcacuggaga

SEQ ID NO: 1247 - RNA, 21 nt, Artificial Seqence
  siRNA antisense strand against b2GPI
agaacaagaugagcacuggag

SEQ ID NO: 1248 - RNA, 21 nt, Artificial Seqence
  siRNA antisense strand against b2GPI
gagaacaagaugagcacugga

SEQ ID NO: 1249 - RNA, 21 nt, Artificial Seqence
  siRNA antisense strand against b2GPI
cgagaacaagaugagcacugg

SEQ ID NO: 1250 - RNA, 21 nt, Artificial Seqence
  siRNA antisense strand against b2GPI
ucgagaacaagaugagcacug

SEQ ID NO: 1251 - RNA, 21 nt, Artificial Seqence
  siRNA antisense strand against b2GPI
cucgagaacaagaugagcacu

SEQ ID NO: 1252 - RNA, 21 nt, Artificial Seqence
  siRNA antisense strand against b2GPI
acucgagaacaagaugagcac

SEQ ID NO: 1253 - RNA, 21 nt, Artificial Seqence
  siRNA antisense strand against b2GPI
aacucgagaacaagaugagca

SEQ ID NO: 1254 - RNA, 21 nt, Artificial Seqence
  siRNA antisense strand against b2GPI
aaacucgagaacaagaugagc

SEQ ID NO: 1255 - RNA, 21 nt, Artificial Seqence
  siRNA antisense strand against b2GPI
aaaacucgagaacaagaugag

SEQ ID NO: 1256 - RNA, 21 nt, Artificial Seqence
  siRNA antisense strand against b2GPI
gaaaacucgagaacaagauga

SEQ ID NO: 1257 - RNA, 21 nt, Artificial Seqence
  siRNA antisense strand against b2GPI
agaaaacucgagaacaagaug

SEQ ID NO: 1258 - RNA, 21 nt, Artificial Seqence
  siRNA antisense strand against b2GPI
gagaaaacucgagaacaagau

SEQ ID NO: 1259 - RNA, 21 nt, Artificial Seqence
  siRNA antisense strand against b2GPI
agagaaaacucgagaacaaga

SEQ ID NO: 1260 - RNA, 21 nt, Artificial Seqence
  siRNA antisense strand against b2GPI
cagagaaaacucgagaacaag

SEQ ID NO: 1261 - RNA, 21 nt, Artificial Seqence
  siRNA antisense strand against b2GPI
gcagagaaaacucgagaacaa

SEQ ID NO: 1262 - RNA, 21 nt, Artificial Seqence
  siRNA antisense strand against b2GPI
ggcagagaaaacucgagaaca

SEQ ID NO: 1263 - RNA, 21 nt, Artificial Seqence
  siRNA antisense strand against b2GPI
uggcagagaaaacucgagaac

SEQ ID NO: 1264 - RNA, 21 nt, Artificial Seqence
  siRNA antisense strand against b2GPI
auggcagagaaaacucgagaa

SEQ ID NO: 1265 - RNA, 21 nt, Artificial Seqence
  siRNA antisense strand against b2GPI
cauggcagagaaaacucgaga

SEQ ID NO: 1266 - RNA, 21 nt, Artificial Seqence
  siRNA antisense strand against b2GPI
acauggcagagaaaacucgag

SEQ ID NO: 1267 - RNA, 21 nt, Artificial Seqence
  siRNA antisense strand against b2GPI
aacauggcagagaaaacucga

SEQ ID NO: 1268 - RNA, 21 nt, Artificial Seqence
  siRNA antisense strand against b2GPI
caacauggcagagaaaacucg

SEQ ID NO: 1269 - RNA, 21 nt, Artificial Seqence
  siRNA antisense strand against b2GPI
gcaacauggcagagaaaacuc

SEQ ID NO: 1270 - RNA, 21 nt, Artificial Seqence
  siRNA antisense strand against b2GPI
agcaacauggcagagaaaacu

SEQ ID NO: 1271 - RNA, 21 nt, Artificial Seqence
  siRNA antisense strand against b2GPI
uagcaacauggcagagaaaac

SEQ ID NO: 1272 - RNA, 21 nt, Artificial Seqence
  siRNA antisense strand against b2GPI
auagcaacauggcagagaaaa

SEQ ID NO: 1273 - RNA, 21 nt, Artificial Seqence
  siRNA antisense strand against b2GPI
aauagcaacauggcagagaaa

SEQ ID NO: 1274 - RNA, 21 nt, Artificial Seqence
  siRNA antisense strand against b2GPI
caauagcaacauggcagagaa

SEQ ID NO: 1275 - RNA, 21 nt, Artificial Seqence
  siRNA antisense strand against b2GPI
gcaauagcaacauggcagaga

SEQ ID NO: 1276 - RNA, 21 nt, Artificial Seqence
  siRNA antisense strand against b2GPI
ugcaauagcaacauggcagag

SEQ ID NO: 1277 - RNA, 21 nt, Artificial Seqence
  siRNA antisense strand against b2GPI
cugcaauagcaacauggcaga

SEQ ID NO: 1278 - RNA, 21 nt, Artificial Seqence
  siRNA antisense strand against b2GPI
ccugcaauagcaacauggcag

SEQ ID NO: 1279 - RNA, 21 nt, Artificial Seqence
  siRNA antisense strand against b2GPI
uccugcaauagcaacauggca

SEQ ID NO: 1280 - RNA, 21 nt, Artificial Seqence
  siRNA antisense strand against b2GPI
guccugcaauagcaacauggc

SEQ ID NO: 1281 - RNA, 21 nt, Artificial Seqence
  siRNA antisense strand against b2GPI
cguccugcaauagcaacaugg

SEQ ID NO: 1282 - RNA, 21 nt, Artificial Seqence
  siRNA antisense strand against b2GPI
ccguccugcaauagcaacaug

SEQ ID NO: 1283 - RNA, 21 nt, Artificial Seqence
  siRNA antisense strand against b2GPI
uccguccugcaauagcaacau

SEQ ID NO: 1284 - RNA, 21 nt, Artificial Seqence
  siRNA antisense strand against b2GPI
guccguccugcaauagcaaca

SEQ ID NO: 1285 - RNA, 21 nt, Artificial Seqence
  siRNA antisense strand against b2GPI
gguccguccugcaauagcaac

SEQ ID NO: 1286 - RNA, 21 nt, Artificial Seqence
  siRNA antisense strand against b2GPI
agguccguccugcaauagcaa

SEQ ID NO: 1287 - RNA, 21 nt, Artificial Seqence
  siRNA antisense strand against b2GPI
cagguccguccugcaauagca

SEQ ID NO: 1288 - RNA, 21 nt, Artificial Seqence
  siRNA antisense strand against b2GPI
acagguccguccugcaauagc

SEQ ID NO: 1289 - RNA, 21 nt, Artificial Seqence
  siRNA antisense strand against b2GPI
gacagguccguccugcaauag

SEQ ID NO: 1290 - RNA, 21 nt, Artificial Seqence
  siRNA antisense strand against b2GPI
ggacagguccguccugcaaua

SEQ ID NO: 1291 - RNA, 21 nt, Artificial Seqence
  siRNA antisense strand against b2GPI
gggacagguccguccugcaau

SEQ ID NO: 1292 - RNA, 21 nt, Artificial Seqence
  siRNA antisense strand against b2GPI
ugggacagguccguccugcaa

SEQ ID NO: 1293 - RNA, 21 nt, Artificial Seqence
  siRNA antisense strand against b2GPI
uugggacagguccguccugca

SEQ ID NO: 1294 - RNA, 21 nt, Artificial Seqence
  siRNA antisense strand against b2GPI
cuugggacagguccguccugc

SEQ ID NO: 1295 - RNA, 21 nt, Artificial Seqence
  siRNA antisense strand against b2GPI
gcuugggacagguccguccug

SEQ ID NO: 1296 - RNA, 21 nt, Artificial Seqence
  siRNA antisense strand against b2GPI
ggcuugggacagguccguccu

SEQ ID NO: 1297 - RNA, 21 nt, Artificial Seqence
  siRNA antisense strand against b2GPI
uggcuugggacagguccgucc

SEQ ID NO: 1298 - RNA, 21 nt, Artificial Seqence
  siRNA antisense strand against b2GPI
cuggcuugggacagguccguc

SEQ ID NO: 1299 - RNA, 21 nt, Artificial Seqence
  siRNA antisense strand against b2GPI
ucuggcuugggacagguccgu

SEQ ID NO: 1300 - RNA, 21 nt, Artificial Seqence
  siRNA antisense strand against b2GPI
aucuggcuugggacagguccg

SEQ ID NO: 1301 - RNA, 21 nt, Artificial Seqence
  siRNA antisense strand against b2GPI
caucuggcuugggacaggucc

SEQ ID NO: 1302 - RNA, 21 nt, Artificial Seqence
  siRNA antisense strand against b2GPI
ucaucuggcuugggacagguc

SEQ ID NO: 1303 - RNA, 21 nt, Artificial Seqence
  siRNA antisense strand against b2GPI
aucaucuggcuugggacaggu

SEQ ID NO: 1304 - RNA, 21 nt, Artificial Seqence
  siRNA antisense strand against b2GPI
aaucaucuggcuugggacagg

SEQ ID NO: 1305 - RNA, 21 nt, Artificial Seqence
  siRNA antisense strand against b2GPI
aaaucaucuggcuugggacag

SEQ ID NO: 1306 - RNA, 21 nt, Artificial Seqence
  siRNA antisense strand against b2GPI
uaaaucaucuggcuugggaca

SEQ ID NO: 1307 - RNA, 21 nt, Artificial Seqence
  siRNA antisense strand against b2GPI
guaaaucaucuggcuugggac

SEQ ID NO: 1308 - RNA, 21 nt, Artificial Seqence
  siRNA antisense strand against b2GPI
gguaaaucaucuggcuuggga

SEQ ID NO: 1309 - RNA, 21 nt, Artificial Seqence
  siRNA antisense strand against b2GPI
ugguaaaucaucuggcuuggg

SEQ ID NO: 1310 - RNA, 21 nt, Artificial Seqence
  siRNA antisense strand against b2GPI
augguaaaucaucuggcuugg

SEQ ID NO: 1311 - RNA, 21 nt, Artificial Seqence
  siRNA antisense strand against b2GPI
aaugguaaaucaucuggcuug

SEQ ID NO: 1312 - RNA, 21 nt, Artificial Seqence
  siRNA antisense strand against b2GPI
aaaugguaaaucaucuggcuu

SEQ ID NO: 1313 - RNA, 21 nt, Artificial Seqence
  siRNA antisense strand against b2GPI
aaaaugguaaaucaucuggcu

SEQ ID NO: 1314 - RNA, 21 nt, Artificial Seqence
  siRNA antisense strand against b2GPI
gaaaaugguaaaucaucuggc

SEQ ID NO: 1315 - RNA, 21 nt, Artificial Seqence
  siRNA antisense strand against b2GPI
ggaaaaugguaaaucaucugg

SEQ ID NO: 1316 - RNA, 21 nt, Artificial Seqence
  siRNA antisense strand against b2GPI
uggaaaaugguaaaucaucug

SEQ ID NO: 1317 - RNA, 21 nt, Artificial Seqence
  siRNA antisense strand against b2GPI
guggaaaaugguaaaucaucu

SEQ ID NO: 1318 - RNA, 21 nt, Artificial Seqence
  siRNA antisense strand against b2GPI
uguggaaaaugguaaaucauc

SEQ ID NO: 1319 - RNA, 21 nt, Artificial Seqence
  siRNA antisense strand against b2GPI
cuguggaaaaugguaaaucau

SEQ ID NO: 1320 - RNA, 21 nt, Artificial Seqence
  siRNA antisense strand against b2GPI
acuguggaaaaugguaaauca

SEQ ID NO: 1321 - RNA, 21 nt, Artificial Seqence
  siRNA antisense strand against b2GPI
cacuguggaaaaugguaaauc

SEQ ID NO: 1322 - RNA, 21 nt, Artificial Seqence
  siRNA antisense strand against b2GPI
ccacuguggaaaaugguaaau

SEQ ID NO: 1323 - RNA, 21 nt, Artificial Seqence
  siRNA antisense strand against b2GPI
accacuguggaaaaugguaaa

SEQ ID NO: 1324 - RNA, 21 nt, Artificial Seqence
  siRNA antisense strand against b2GPI
gaccacuguggaaaaugguaa

SEQ ID NO: 1325 - RNA, 21 nt, Artificial Seqence
  siRNA antisense strand against b2GPI
ggaccacuguggaaaauggua

SEQ ID NO: 1326 - RNA, 21 nt, Artificial Seqence
  siRNA antisense strand against b2GPI
gggaccacuguggaaaauggu

SEQ ID NO: 1327 - RNA, 21 nt, Artificial Seqence
  siRNA antisense strand against b2GPI
cgggaccacuguggaaaaugg

SEQ ID NO: 1328 - RNA, 21 nt, Artificial Seqence
  siRNA antisense strand against b2GPI
acgggaccacuguggaaaaug

SEQ ID NO: 1329 - RNA, 21 nt, Artificial Seqence
  siRNA antisense strand against b2GPI
aacgggaccacuguggaaaau

SEQ ID NO: 1330 - RNA, 21 nt, Artificial Seqence
  siRNA antisense strand against b2GPI
uaacgggaccacuguggaaaa

SEQ ID NO: 1331 - RNA, 21 nt, Artificial Seqence
  siRNA antisense strand against b2GPI
uuaacgggaccacuguggaaa

SEQ ID NO: 1332 - RNA, 21 nt, Artificial Seqence
  siRNA antisense strand against b2GPI
uuuaacgggaccacuguggaa

SEQ ID NO: 1333 - RNA, 21 nt, Artificial Seqence
  siRNA antisense strand against b2GPI
uuuuaacgggaccacugugga

SEQ ID NO: 1334 - RNA, 21 nt, Artificial Seqence
  siRNA antisense strand against b2GPI
uuuuuaacgggaccacugugg

SEQ ID NO: 1335 - RNA, 21 nt, Artificial Seqence
  siRNA antisense strand against b2GPI
guuuuuaacgggaccacugug

SEQ ID NO: 1336 - RNA, 21 nt, Artificial Seqence
  siRNA antisense strand against b2GPI
uguuuuuaacgggaccacugu

SEQ ID NO: 1337 - RNA, 21 nt, Artificial Seqence
  siRNA antisense strand against b2GPI
auguuuuuaacgggaccacug

SEQ ID NO: 1338 - RNA, 21 nt, Artificial Seqence
  siRNA antisense strand against b2GPI
aauguuuuuaacgggaccacu

SEQ ID NO: 1339 - RNA, 21 nt, Artificial Seqence
  siRNA antisense strand against b2GPI
gaauguuuuuaacgggaccac

SEQ ID NO: 1340 - RNA, 21 nt, Artificial Seqence
  siRNA antisense strand against b2GPI
agaauguuuuuaacgggacca

SEQ ID NO: 1341 - RNA, 21 nt, Artificial Seqence
  siRNA antisense strand against b2GPI
uagaauguuuuuaacgggacc

SEQ ID NO: 1342 - RNA, 21 nt, Artificial Seqence
  siRNA antisense strand against b2GPI
auagaauguuuuuaacgggac

SEQ ID NO: 1343 - RNA, 21 nt, Artificial Seqence
  siRNA antisense strand against b2GPI
cauagaauguuuuuaacggga

SEQ ID NO: 1344 - RNA, 21 nt, Artificial Seqence
  siRNA antisense strand against b2GPI
ucauagaauguuuuuaacggg

SEQ ID NO: 1345 - RNA, 21 nt, Artificial Seqence
  siRNA antisense strand against b2GPI
cucauagaauguuuuuaacgg

SEQ ID NO: 1346 - RNA, 21 nt, Artificial Seqence
  siRNA antisense strand against b2GPI
gcucauagaauguuuuuaacg

SEQ ID NO: 1347 - RNA, 21 nt, Artificial Seqence
  siRNA antisense strand against b2GPI
ggcucauagaauguuuuuaac

SEQ ID NO: 1348 - RNA, 21 nt, Artificial Seqence
  siRNA antisense strand against b2GPI
uggcucauagaauguuuuuaa

SEQ ID NO: 1349 - RNA, 21 nt, Artificial Seqence
  siRNA antisense strand against b2GPI
cuggcucauagaauguuuuua

SEQ ID NO: 1350 - RNA, 21 nt, Artificial Seqence
  siRNA antisense strand against b2GPI
ccuggcucauagaauguuuuu

SEQ ID NO: 1351 - RNA, 21 nt, Artificial Seqence
  siRNA antisense strand against b2GPI
uccuggcucauagaauguuuu

SEQ ID NO: 1352 - RNA, 21 nt, Artificial Seqence
  siRNA antisense strand against b2GPI
cuccuggcucauagaauguuu

SEQ ID NO: 1353 - RNA, 21 nt, Artificial Seqence
  siRNA antisense strand against b2GPI
ucuccuggcucauagaauguu

SEQ ID NO: 1354 - RNA, 21 nt, Artificial Seqence
  siRNA antisense strand against b2GPI
uucuccuggcucauagaaugu

SEQ ID NO: 1355 - RNA, 21 nt, Artificial Seqence
  siRNA antisense strand against b2GPI
cuucuccuggcucauagaaug

SEQ ID NO: 1356 - RNA, 21 nt, Artificial Seqence
  siRNA antisense strand against b2GPI
ucuucuccuggcucauagaau

SEQ ID NO: 1357 - RNA, 21 nt, Artificial Seqence
  siRNA antisense strand against b2GPI
cucuucuccuggcucauagaa

SEQ ID NO: 1358 - RNA, 21 nt, Artificial Seqence
  siRNA antisense strand against b2GPI
ucucuucuccuggcucauaga

SEQ ID NO: 1359 - RNA, 21 nt, Artificial Seqence
  siRNA antisense strand against b2GPI
aucucuucuccuggcucauag

SEQ ID NO: 1360 - RNA, 21 nt, Artificial Seqence
  siRNA antisense strand against b2GPI
aaucucuucuccuggcucaua

SEQ ID NO: 1361 - RNA, 21 nt, Artificial Seqence
  siRNA antisense strand against b2GPI
uaaucucuucuccuggcucau

SEQ ID NO: 1362 - RNA, 21 nt, Artificial Seqence
  siRNA antisense strand against b2GPI
guaaucucuucuccuggcuca

SEQ ID NO: 1363 - RNA, 21 nt, Artificial Seqence
  siRNA antisense strand against b2GPI
cguaaucucuucuccuggcuc

SEQ ID NO: 1364 - RNA, 21 nt, Artificial Seqence
  siRNA antisense strand against b2GPI
acguaaucucuucuccuggcu

SEQ ID NO: 1365 - RNA, 21 nt, Artificial Seqence
  siRNA antisense strand against b2GPI
uacguaaucucuucuccuggc

SEQ ID NO: 1366 - RNA, 21 nt, Artificial Seqence
  siRNA antisense strand against b2GPI
auacguaaucucuucuccugg

SEQ ID NO: 1367 - RNA, 21 nt, Artificial Seqence
  siRNA antisense strand against b2GPI
aauacguaaucucuucuccug

SEQ ID NO: 1368 - RNA, 21 nt, Artificial Seqence
  siRNA antisense strand against b2GPI
gaauacguaaucucuucuccu

SEQ ID NO: 1369 - RNA, 21 nt, Artificial Seqence
  siRNA antisense strand against b2GPI
ggaauacguaaucucuucucc

SEQ ID NO: 1370 - RNA, 21 nt, Artificial Seqence
  siRNA antisense strand against b2GPI
aggaauacguaaucucuucuc

SEQ ID NO: 1371 - RNA, 21 nt, Artificial Seqence
  siRNA antisense strand against b2GPI
caggaauacguaaucucuucu

SEQ ID NO: 1372 - RNA, 21 nt, Artificial Seqence
  siRNA antisense strand against b2GPI
gcaggaauacguaaucucuuc

SEQ ID NO: 1373 - RNA, 21 nt, Artificial Seqence
  siRNA antisense strand against b2GPI
ugcaggaauacguaaucucuu

SEQ ID NO: 1374 - RNA, 21 nt, Artificial Seqence
  siRNA antisense strand against b2GPI
uugcaggaauacguaaucucu

SEQ ID NO: 1375 - RNA, 21 nt, Artificial Seqence
  siRNA antisense strand against b2GPI
cuugcaggaauacguaaucuc

SEQ ID NO: 1376 - RNA, 21 nt, Artificial Seqence
  siRNA antisense strand against b2GPI
gcuugcaggaauacguaaucu

SEQ ID NO: 1377 - RNA, 21 nt, Artificial Seqence
  siRNA antisense strand against b2GPI
ggcuugcaggaauacguaauc

SEQ ID NO: 1378 - RNA, 21 nt, Artificial Seqence
  siRNA antisense strand against b2GPI
cggcuugcaggaauacguaau

SEQ ID NO: 1379 - RNA, 21 nt, Artificial Seqence
  siRNA antisense strand against b2GPI
ccggcuugcaggaauacguaa

SEQ ID NO: 1380 - RNA, 21 nt, Artificial Seqence
  siRNA antisense strand against b2GPI
cccggcuugcaggaauacgua

SEQ ID NO: 1381 - RNA, 21 nt, Artificial Seqence
  siRNA antisense strand against b2GPI
gcccggcuugcaggaauacgu

SEQ ID NO: 1382 - RNA, 21 nt, Artificial Seqence
  siRNA antisense strand against b2GPI
agcccggcuugcaggaauacg

SEQ ID NO: 1383 - RNA, 21 nt, Artificial Seqence
  siRNA antisense strand against b2GPI
uagcccggcuugcaggaauac

SEQ ID NO: 1384 - RNA, 21 nt, Artificial Seqence
  siRNA antisense strand against b2GPI
auagcccggcuugcaggaaua

SEQ ID NO: 1385 - RNA, 21 nt, Artificial Seqence
  siRNA antisense strand against b2GPI
cauagcccggcuugcaggaau

SEQ ID NO: 1386 - RNA, 21 nt, Artificial Seqence
  siRNA antisense strand against b2GPI
acauagcccggcuugcaggaa

SEQ ID NO: 1387 - RNA, 21 nt, Artificial Seqence
  siRNA antisense strand against b2GPI
cacauagcccggcuugcagga

SEQ ID NO: 1388 - RNA, 21 nt, Artificial Seqence
  siRNA antisense strand against b2GPI
acacauagcccggcuugcagg

SEQ ID NO: 1389 - RNA, 21 nt, Artificial Seqence
  siRNA antisense strand against b2GPI
gacacauagcccggcuugcag

SEQ ID NO: 1390 - RNA, 21 nt, Artificial Seqence
  siRNA antisense strand against b2GPI
ggacacauagcccggcuugca

SEQ ID NO: 1391 - RNA, 21 nt, Artificial Seqence
  siRNA antisense strand against b2GPI
gggacacauagcccggcuugc

SEQ ID NO: 1392 - RNA, 21 nt, Artificial Seqence
  siRNA antisense strand against b2GPI
cgggacacauagcccggcuug

SEQ ID NO: 1393 - RNA, 21 nt, Artificial Seqence
  siRNA antisense strand against b2GPI
ucgggacacauagcccggcuu

SEQ ID NO: 1394 - RNA, 21 nt, Artificial Seqence
  siRNA antisense strand against b2GPI
cucgggacacauagcccggcu

SEQ ID NO: 1395 - RNA, 21 nt, Artificial Seqence
  siRNA antisense strand against b2GPI
ccucgggacacauagcccggc

SEQ ID NO: 1396 - RNA, 21 nt, Artificial Seqence
  siRNA antisense strand against b2GPI
uccucgggacacauagcccgg

SEQ ID NO: 1397 - RNA, 21 nt, Artificial Seqence
  siRNA antisense strand against b2GPI
cuccucgggacacauagcccg

SEQ ID NO: 1398 - RNA, 21 nt, Artificial Seqence
  siRNA antisense strand against b2GPI
ccuccucgggacacauagccc

SEQ ID NO: 1399 - RNA, 21 nt, Artificial Seqence
  siRNA antisense strand against b2GPI
cccuccucgggacacauagcc

SEQ ID NO: 1400 - RNA, 21 nt, Artificial Seqence
  siRNA antisense strand against b2GPI
ucccuccucgggacacauagc

SEQ ID NO: 1401 - RNA, 21 nt, Artificial Seqence
  siRNA antisense strand against b2GPI
aucccuccucgggacacauag

SEQ ID NO: 1402 - RNA, 21 nt, Artificial Seqence
  siRNA antisense strand against b2GPI
caucccuccucgggacacaua

SEQ ID NO: 1403 - RNA, 21 nt, Artificial Seqence
  siRNA antisense strand against b2GPI
ucaucccuccucgggacacau

SEQ ID NO: 1404 - RNA, 21 nt, Artificial Seqence
  siRNA antisense strand against b2GPI
cucaucccuccucgggacaca

SEQ ID NO: 1405 - RNA, 21 nt, Artificial Seqence
  siRNA antisense strand against b2GPI
ucucaucccuccucgggacac

SEQ ID NO: 1406 - RNA, 21 nt, Artificial Seqence
  siRNA antisense strand against b2GPI
uucucaucccuccucgggaca

SEQ ID NO: 1407 - RNA, 21 nt, Artificial Seqence
  siRNA antisense strand against b2GPI
uuucucaucccuccucgggac

SEQ ID NO: 1408 - RNA, 21 nt, Artificial Seqence
  siRNA antisense strand against b2GPI
cuuucucaucccuccucggga

SEQ ID NO: 1409 - RNA, 21 nt, Artificial Seqence
  siRNA antisense strand against b2GPI
acuuucucaucccuccucggg

SEQ ID NO: 1410 - RNA, 21 nt, Artificial Seqence
  siRNA antisense strand against b2GPI
aacuuucucaucccuccucgg

SEQ ID NO: 1411 - RNA, 21 nt, Artificial Seqence
  siRNA antisense strand against b2GPI
aaacuuucucaucccuccucg

SEQ ID NO: 1412 - RNA, 21 nt, Artificial Seqence
  siRNA antisense strand against b2GPI
uaaacuuucucaucccuccuc

SEQ ID NO: 1413 - RNA, 21 nt, Artificial Seqence
  siRNA antisense strand against b2GPI
auaaacuuucucaucccuccu

SEQ ID NO: 1414 - RNA, 21 nt, Artificial Seqence
  siRNA antisense strand against b2GPI
gauaaacuuucucaucccucc

SEQ ID NO: 1415 - RNA, 21 nt, Artificial Seqence
  siRNA antisense strand against b2GPI
agauaaacuuucucaucccuc

SEQ ID NO: 1416 - RNA, 21 nt, Artificial Seqence
  siRNA antisense strand against b2GPI
cagauaaacuuucucaucccu

SEQ ID NO: 1417 - RNA, 21 nt, Artificial Seqence
  siRNA antisense strand against b2GPI
gcagauaaacuuucucauccc

SEQ ID NO: 1418 - RNA, 21 nt, Artificial Seqence
  siRNA antisense strand against b2GPI
ggcagauaaacuuucucaucc

SEQ ID NO: 1419 - RNA, 21 nt, Artificial Seqence
  siRNA antisense strand against b2GPI
gggcagauaaacuuucucauc

SEQ ID NO: 1420 - RNA, 21 nt, Artificial Seqence
  siRNA antisense strand against b2GPI
agggcagauaaacuuucucau

SEQ ID NO: 1421 - RNA, 21 nt, Artificial Seqence
  siRNA antisense strand against b2GPI
gagggcagauaaacuuucuca

SEQ ID NO: 1422 - RNA, 21 nt, Artificial Seqence
  siRNA antisense strand against b2GPI
agagggcagauaaacuuucuc

SEQ ID NO: 1423 - RNA, 21 nt, Artificial Seqence
  siRNA antisense strand against b2GPI
gagagggcagauaaacuuucu

SEQ ID NO: 1424 - RNA, 21 nt, Artificial Seqence
  siRNA antisense strand against b2GPI
ugagagggcagauaaacuuuc

SEQ ID NO: 1425 - RNA, 21 nt, Artificial Seqence
  siRNA antisense strand against b2GPI
gugagagggcagauaaacuuu

SEQ ID NO: 1426 - RNA, 21 nt, Artificial Seqence
  siRNA antisense strand against b2GPI
ugugagagggcagauaaacuu

SEQ ID NO: 1427 - RNA, 21 nt, Artificial Seqence
  siRNA antisense strand against b2GPI
cugugagagggcagauaaacu

SEQ ID NO: 1428 - RNA, 21 nt, Artificial Seqence
  siRNA antisense strand against b2GPI
ccugugagagggcagauaaac

SEQ ID NO: 1429 - RNA, 21 nt, Artificial Seqence
  siRNA antisense strand against b2GPI
uccugugagagggcagauaaa

SEQ ID NO: 1430 - RNA, 21 nt, Artificial Seqence
  siRNA antisense strand against b2GPI
guccugugagagggcagauaa

SEQ ID NO: 1431 - RNA, 21 nt, Artificial Seqence
  siRNA antisense strand against b2GPI
aguccugugagagggcagaua

SEQ ID NO: 1432 - RNA, 21 nt, Artificial Seqence
  siRNA antisense strand against b2GPI
caguccugugagagggcagau

SEQ ID NO: 1433 - RNA, 21 nt, Artificial Seqence
  siRNA antisense strand against b2GPI
acaguccugugagagggcaga

SEQ ID NO: 1434 - RNA, 21 nt, Artificial Seqence
  siRNA antisense strand against b2GPI
cacaguccugugagagggcag

SEQ ID NO: 1435 - RNA, 21 nt, Artificial Seqence
  siRNA antisense strand against b2GPI
ccacaguccugugagagggca

SEQ ID NO: 1436 - RNA, 21 nt, Artificial Seqence
  siRNA antisense strand against b2GPI
gccacaguccugugagagggc

SEQ ID NO: 1437 - RNA, 21 nt, Artificial Seqence
  siRNA antisense strand against b2GPI
ggccacaguccugugagaggg

SEQ ID NO: 1438 - RNA, 21 nt, Artificial Seqence
  siRNA antisense strand against b2GPI
gggccacaguccugugagagg

SEQ ID NO: 1439 - RNA, 21 nt, Artificial Seqence
  siRNA antisense strand against b2GPI
ugggccacaguccugugagag

SEQ ID NO: 1440 - RNA, 21 nt, Artificial Seqence
  siRNA antisense strand against b2GPI
augggccacaguccugugaga

SEQ ID NO: 1441 - RNA, 21 nt, Artificial Seqence
  siRNA antisense strand against b2GPI
gaugggccacaguccugugag

SEQ ID NO: 1442 - RNA, 21 nt, Artificial Seqence
  siRNA antisense strand against b2GPI
ugaugggccacaguccuguga

SEQ ID NO: 1443 - RNA, 21 nt, Artificial Seqence
  siRNA antisense strand against b2GPI
uugaugggccacaguccugug

SEQ ID NO: 1444 - RNA, 21 nt, Artificial Seqence
  siRNA antisense strand against b2GPI
guugaugggccacaguccugu

SEQ ID NO: 1445 - RNA, 21 nt, Artificial Seqence
  siRNA antisense strand against b2GPI
uguugaugggccacaguccug

SEQ ID NO: 1446 - RNA, 21 nt, Artificial Seqence
  siRNA antisense strand against b2GPI
guguugaugggccacaguccu

SEQ ID NO: 1447 - RNA, 21 nt, Artificial Seqence
  siRNA antisense strand against b2GPI
aguguugaugggccacagucc

SEQ ID NO: 1448 - RNA, 21 nt, Artificial Seqence
  siRNA antisense strand against b2GPI
gaguguugaugggccacaguc

SEQ ID NO: 1449 - RNA, 21 nt, Artificial Seqence
  siRNA antisense strand against b2GPI
agaguguugaugggccacagu

SEQ ID NO: 1450 - RNA, 21 nt, Artificial Seqence
  siRNA antisense strand against b2GPI
cagaguguugaugggccacag

SEQ ID NO: 1451 - RNA, 21 nt, Artificial Seqence
  siRNA antisense strand against b2GPI
ucagaguguugaugggccaca

SEQ ID NO: 1452 - RNA, 21 nt, Artificial Seqence
  siRNA antisense strand against b2GPI
uucagaguguugaugggccac

SEQ ID NO: 1453 - RNA, 21 nt, Artificial Seqence
  siRNA antisense strand against b2GPI
uuucagaguguugaugggcca

SEQ ID NO: 1454 - RNA, 21 nt, Artificial Seqence
  siRNA antisense strand against b2GPI
auuucagaguguugaugggcc

SEQ ID NO: 1455 - RNA, 21 nt, Artificial Seqence
  siRNA antisense strand against b2GPI
cauuucagaguguugaugggc

SEQ ID NO: 1456 - RNA, 21 nt, Artificial Seqence
  siRNA antisense strand against b2GPI
acauuucagaguguugauggg

SEQ ID NO: 1457 - RNA, 21 nt, Artificial Seqence
  siRNA antisense strand against b2GPI
uacauuucagaguguugaugg

SEQ ID NO: 1458 - RNA, 21 nt, Artificial Seqence
  siRNA antisense strand against b2GPI
guacauuucagaguguugaug

SEQ ID NO: 1459 - RNA, 21 nt, Artificial Seqence
  siRNA antisense strand against b2GPI
uguacauuucagaguguugau

SEQ ID NO: 1460 - RNA, 21 nt, Artificial Seqence
  siRNA antisense strand against b2GPI
guguacauuucagaguguuga

SEQ ID NO: 1461 - RNA, 21 nt, Artificial Seqence
  siRNA antisense strand against b2GPI
gguguacauuucagaguguug

SEQ ID NO: 1462 - RNA, 21 nt, Artificial Seqence
  siRNA antisense strand against b2GPI
ggguguacauuucagaguguu

SEQ ID NO: 1463 - RNA, 21 nt, Artificial Seqence
  siRNA antisense strand against b2GPI
uggguguacauuucagagugu

SEQ ID NO: 1464 - RNA, 21 nt, Artificial Seqence
  siRNA antisense strand against b2GPI
cuggguguacauuucagagug

SEQ ID NO: 1465 - RNA, 21 nt, Artificial Seqence
  siRNA antisense strand against b2GPI
ucuggguguacauuucagagu

SEQ ID NO: 1466 - RNA, 21 nt, Artificial Seqence
  siRNA antisense strand against b2GPI
cucuggguguacauuucagag

SEQ ID NO: 1467 - RNA, 21 nt, Artificial Seqence
  siRNA antisense strand against b2GPI
acucuggguguacauuucaga

SEQ ID NO: 1468 - RNA, 21 nt, Artificial Seqence
  siRNA antisense strand against b2GPI
uacucuggguguacauuucag

SEQ ID NO: 1469 - RNA, 21 nt, Artificial Seqence
  siRNA antisense strand against b2GPI
auacucuggguguacauuuca

SEQ ID NO: 1470 - RNA, 21 nt, Artificial Seqence
  siRNA antisense strand against b2GPI
cauacucuggguguacauuuc

SEQ ID NO: 1471 - RNA, 21 nt, Artificial Seqence
  siRNA antisense strand against b2GPI
acauacucuggguguacauuu

SEQ ID NO: 1472 - RNA, 21 nt, Artificial Seqence
  siRNA antisense strand against b2GPI
gacauacucuggguguacauu

SEQ ID NO: 1473 - RNA, 21 nt, Artificial Seqence
  siRNA antisense strand against b2GPI
ggacauacucuggguguacau

SEQ ID NO: 1474 - RNA, 21 nt, Artificial Seqence
  siRNA antisense strand against b2GPI
aggacauacucuggguguaca

SEQ ID NO: 1475 - RNA, 21 nt, Artificial Seqence
  siRNA antisense strand against b2GPI
aaggacauacucuggguguac

SEQ ID NO: 1476 - RNA, 21 nt, Artificial Seqence
  siRNA antisense strand against b2GPI
aaaggacauacucugggugua

SEQ ID NO: 1477 - RNA, 21 nt, Artificial Seqence
  siRNA antisense strand against b2GPI
aaaaggacauacucugggugu

SEQ ID NO: 1478 - RNA, 21 nt, Artificial Seqence
  siRNA antisense strand against b2GPI
caaaaggacauacucugggug

SEQ ID NO: 1479 - RNA, 21 nt, Artificial Seqence
  siRNA antisense strand against b2GPI
gcaaaaggacauacucugggu

SEQ ID NO: 1480 - RNA, 21 nt, Artificial Seqence
  siRNA antisense strand against b2GPI
agcaaaaggacauacucuggg

SEQ ID NO: 1481 - RNA, 21 nt, Artificial Seqence
  siRNA antisense strand against b2GPI
cagcaaaaggacauacucugg

SEQ ID NO: 1482 - RNA, 21 nt, Artificial Seqence
  siRNA antisense strand against b2GPI
ccagcaaaaggacauacucug

SEQ ID NO: 1483 - RNA, 21 nt, Artificial Seqence
  siRNA antisense strand against b2GPI
uccagcaaaaggacauacucu

SEQ ID NO: 1484 - RNA, 21 nt, Artificial Seqence
  siRNA antisense strand against b2GPI
uuccagcaaaaggacauacuc

SEQ ID NO: 1485 - RNA, 21 nt, Artificial Seqence
  siRNA antisense strand against b2GPI
auuccagcaaaaggacauacu

SEQ ID NO: 1486 - RNA, 21 nt, Artificial Seqence
  siRNA antisense strand against b2GPI
gauuccagcaaaaggacauac

SEQ ID NO: 1487 - RNA, 21 nt, Artificial Seqence
  siRNA antisense strand against b2GPI
agauuccagcaaaaggacaua

SEQ ID NO: 1488 - RNA, 21 nt, Artificial Seqence
  siRNA antisense strand against b2GPI
aagauuccagcaaaaggacau

SEQ ID NO: 1489 - RNA, 21 nt, Artificial Seqence
  siRNA antisense strand against b2GPI
uaagauuccagcaaaaggaca

SEQ ID NO: 1490 - RNA, 21 nt, Artificial Seqence
  siRNA antisense strand against b2GPI
cuaagauuccagcaaaaggac

SEQ ID NO: 1491 - RNA, 21 nt, Artificial Seqence
  siRNA antisense strand against b2GPI
ucuaagauuccagcaaaagga

SEQ ID NO: 1492 - RNA, 21 nt, Artificial Seqence
  siRNA antisense strand against b2GPI
uucuaagauuccagcaaaagg

SEQ ID NO: 1493 - RNA, 21 nt, Artificial Seqence
  siRNA antisense strand against b2GPI
uuucuaagauuccagcaaaag

SEQ ID NO: 1494 - RNA, 21 nt, Artificial Seqence
  siRNA antisense strand against b2GPI
uuuucuaagauuccagcaaaa

SEQ ID NO: 1495 - RNA, 21 nt, Artificial Seqence
  siRNA antisense strand against b2GPI
auuuucuaagauuccagcaaa

SEQ ID NO: 1496 - RNA, 21 nt, Artificial Seqence
  siRNA antisense strand against b2GPI
cauuuucuaagauuccagcaa

SEQ ID NO: 1497 - RNA, 21 nt, Artificial Seqence
  siRNA antisense strand against b2GPI
ccauuuucuaagauuccagca

SEQ ID NO: 1498 - RNA, 21 nt, Artificial Seqence
  siRNA antisense strand against b2GPI
uccauuuucuaagauuccagc

SEQ ID NO: 1499 - RNA, 21 nt, Artificial Seqence
  siRNA antisense strand against b2GPI
cuccauuuucuaagauuccag

SEQ ID NO: 1500 - RNA, 21 nt, Artificial Seqence
  siRNA antisense strand against b2GPI
gcuccauuuucuaagauucca

SEQ ID NO: 1501 - RNA, 21 nt, Artificial Seqence
  siRNA antisense strand against b2GPI
ggcuccauuuucuaagauucc

SEQ ID NO: 1502 - RNA, 21 nt, Artificial Seqence
  siRNA antisense strand against b2GPI
cggcuccauuuucuaagauuc

SEQ ID NO: 1503 - RNA, 21 nt, Artificial Seqence
  siRNA antisense strand against b2GPI
acggcuccauuuucuaagauu

SEQ ID NO: 1504 - RNA, 21 nt, Artificial Seqence
  siRNA antisense strand against b2GPI
uacggcuccauuuucuaagau

SEQ ID NO: 1505 - RNA, 21 nt, Artificial Seqence
  siRNA antisense strand against b2GPI
guacggcuccauuuucuaaga

SEQ ID NO: 1506 - RNA, 21 nt, Artificial Seqence
  siRNA antisense strand against b2GPI
cguacggcuccauuuucuaag

SEQ ID NO: 1507 - RNA, 21 nt, Artificial Seqence
  siRNA antisense strand against b2GPI
gcguacggcuccauuuucuaa

SEQ ID NO: 1508 - RNA, 21 nt, Artificial Seqence
  siRNA antisense strand against b2GPI
agcguacggcuccauuuucua

SEQ ID NO: 1509 - RNA, 21 nt, Artificial Seqence
  siRNA antisense strand against b2GPI
uagcguacggcuccauuuucu

SEQ ID NO: 1510 - RNA, 21 nt, Artificial Seqence
  siRNA antisense strand against b2GPI
auagcguacggcuccauuuuc

SEQ ID NO: 1511 - RNA, 21 nt, Artificial Seqence
  siRNA antisense strand against b2GPI
uauagcguacggcuccauuuu

SEQ ID NO: 1512 - RNA, 21 nt, Artificial Seqence
  siRNA antisense strand against b2GPI
guauagcguacggcuccauuu

SEQ ID NO: 1513 - RNA, 21 nt, Artificial Seqence
  siRNA antisense strand against b2GPI
cguauagcguacggcuccauu

SEQ ID NO: 1514 - RNA, 21 nt, Artificial Seqence
  siRNA antisense strand against b2GPI
ucguauagcguacggcuccau

SEQ ID NO: 1515 - RNA, 21 nt, Artificial Seqence
  siRNA antisense strand against b2GPI
gucguauagcguacggcucca

SEQ ID NO: 1516 - RNA, 21 nt, Artificial Seqence
  siRNA antisense strand against b2GPI
agucguauagcguacggcucc

SEQ ID NO: 1517 - RNA, 21 nt, Artificial Seqence
  siRNA antisense strand against b2GPI
aagucguauagcguacggcuc

SEQ ID NO: 1518 - RNA, 21 nt, Artificial Seqence
  siRNA antisense strand against b2GPI
aaagucguauagcguacggcu

SEQ ID NO: 1519 - RNA, 21 nt, Artificial Seqence
  siRNA antisense strand against b2GPI
aaaagucguauagcguacggc

SEQ ID NO: 1520 - RNA, 21 nt, Artificial Seqence
  siRNA antisense strand against b2GPI
caaaagucguauagcguacgg

SEQ ID NO: 1521 - RNA, 21 nt, Artificial Seqence
  siRNA antisense strand against b2GPI
ucaaaagucguauagcguacg

SEQ ID NO: 1522 - RNA, 21 nt, Artificial Seqence
  siRNA antisense strand against b2GPI
uucaaaagucguauagcguac

SEQ ID NO: 1523 - RNA, 21 nt, Artificial Seqence
  siRNA antisense strand against b2GPI
auucaaaagucguauagcgua

SEQ ID NO: 1524 - RNA, 21 nt, Artificial Seqence
  siRNA antisense strand against b2GPI
uauucaaaagucguauagcgu

SEQ ID NO: 1525 - RNA, 21 nt, Artificial Seqence
  siRNA antisense strand against b2GPI
auauucaaaagucguauagcg

SEQ ID NO: 1526 - RNA, 21 nt, Artificial Seqence
  siRNA antisense strand against b2GPI
gauauucaaaagucguauagc

SEQ ID NO: 1527 - RNA, 21 nt, Artificial Seqence
  siRNA antisense strand against b2GPI
ggauauucaaaagucguauag

SEQ ID NO: 1528 - RNA, 21 nt, Artificial Seqence
  siRNA antisense strand against b2GPI
gggauauucaaaagucguaua

SEQ ID NO: 1529 - RNA, 21 nt, Artificial Seqence
  siRNA antisense strand against b2GPI
ugggauauucaaaagucguau

SEQ ID NO: 1530 - RNA, 21 nt, Artificial Seqence
  siRNA antisense strand against b2GPI
uugggauauucaaaagucgua

SEQ ID NO: 1531 - RNA, 21 nt, Artificial Seqence
  siRNA antisense strand against b2GPI
guugggauauucaaaagucgu

SEQ ID NO: 1532 - RNA, 21 nt, Artificial Seqence
  siRNA antisense strand against b2GPI
uguugggauauucaaaagucg

SEQ ID NO: 1533 - RNA, 21 nt, Artificial Seqence
  siRNA antisense strand against b2GPI
guguugggauauucaaaaguc

SEQ ID NO: 1534 - RNA, 21 nt, Artificial Seqence
  siRNA antisense strand against b2GPI
cguguugggauauucaaaagu

SEQ ID NO: 1535 - RNA, 21 nt, Artificial Seqence
  siRNA antisense strand against b2GPI
ucguguugggauauucaaaag

SEQ ID NO: 1536 - RNA, 21 nt, Artificial Seqence
  siRNA antisense strand against b2GPI
aucguguugggauauucaaaa

SEQ ID NO: 1537 - RNA, 21 nt, Artificial Seqence
  siRNA antisense strand against b2GPI
gaucguguugggauauucaaa

SEQ ID NO: 1538 - RNA, 21 nt, Artificial Seqence
  siRNA antisense strand against b2GPI
ugaucguguugggauauucaa

SEQ ID NO: 1539 - RNA, 21 nt, Artificial Seqence
  siRNA antisense strand against b2GPI
cugaucguguugggauauuca

SEQ ID NO: 1540 - RNA, 21 nt, Artificial Seqence
  siRNA antisense strand against b2GPI
acugaucguguugggauauuc

SEQ ID NO: 1541 - RNA, 21 nt, Artificial Seqence
  siRNA antisense strand against b2GPI
aacugaucguguugggauauu

SEQ ID NO: 1542 - RNA, 21 nt, Artificial Seqence
  siRNA antisense strand against b2GPI
aaacugaucguguugggauau

SEQ ID NO: 1543 - RNA, 21 nt, Artificial Seqence
  siRNA antisense strand against b2GPI
aaaacugaucguguugggaua

SEQ ID NO: 1544 - RNA, 21 nt, Artificial Seqence
  siRNA antisense strand against b2GPI
aaaaacugaucguguugggau

SEQ ID NO: 1545 - RNA, 21 nt, Artificial Seqence
  siRNA antisense strand against b2GPI
gaaaaacugaucguguuggga

SEQ ID NO: 1546 - RNA, 21 nt, Artificial Seqence
  siRNA antisense strand against b2GPI
agaaaaacugaucguguuggg

SEQ ID NO: 1547 - RNA, 21 nt, Artificial Seqence
  siRNA antisense strand against b2GPI
aagaaaaacugaucguguugg

SEQ ID NO: 1548 - RNA, 21 nt, Artificial Seqence
  siRNA antisense strand against b2GPI
caagaaaaacugaucguguug

SEQ ID NO: 1549 - RNA, 21 nt, Artificial Seqence
  siRNA antisense strand against b2GPI
acaagaaaaacugaucguguu

SEQ ID NO: 1550 - RNA, 21 nt, Artificial Seqence
  siRNA antisense strand against b2GPI
uacaagaaaaacugaucgugu

SEQ ID NO: 1551 - RNA, 21 nt, Artificial Seqence
  siRNA antisense strand against b2GPI
uuacaagaaaaacugaucgug

SEQ ID NO: 1552 - RNA, 21 nt, Artificial Seqence
  siRNA antisense strand against b2GPI
guuacaagaaaaacugaucgu

SEQ ID NO: 1553 - RNA, 21 nt, Artificial Seqence
  siRNA antisense strand against b2GPI
uguuacaagaaaaacugaucg

SEQ ID NO: 1554 - RNA, 21 nt, Artificial Seqence
  siRNA antisense strand against b2GPI
guguuacaagaaaaacugauc

SEQ ID NO: 1555 - RNA, 21 nt, Artificial Seqence
  siRNA antisense strand against b2GPI
aguguuacaagaaaaacugau

SEQ ID NO: 1556 - RNA, 21 nt, Artificial Seqence
  siRNA antisense strand against b2GPI
caguguuacaagaaaaacuga

SEQ ID NO: 1557 - RNA, 21 nt, Artificial Seqence
  siRNA antisense strand against b2GPI
ccaguguuacaagaaaaacug

SEQ ID NO: 1558 - RNA, 21 nt, Artificial Seqence
  siRNA antisense strand against b2GPI
cccaguguuacaagaaaaacu

SEQ ID NO: 1559 - RNA, 21 nt, Artificial Seqence
  siRNA antisense strand against b2GPI
acccaguguuacaagaaaaac

SEQ ID NO: 1560 - RNA, 21 nt, Artificial Seqence
  siRNA antisense strand against b2GPI
aacccaguguuacaagaaaaa

SEQ ID NO: 1561 - RNA, 21 nt, Artificial Seqence
  siRNA antisense strand against b2GPI
aaacccaguguuacaagaaaa

SEQ ID NO: 1562 - RNA, 21 nt, Artificial Seqence
  siRNA antisense strand against b2GPI
aaaacccaguguuacaagaaa

SEQ ID NO: 1563 - RNA, 21 nt, Artificial Seqence
  siRNA antisense strand against b2GPI
uaaaacccaguguuacaagaa

SEQ ID NO: 1564 - RNA, 21 nt, Artificial Seqence
  siRNA antisense strand against b2GPI
auaaaacccaguguuacaaga

SEQ ID NO: 1565 - RNA, 21 nt, Artificial Seqence
  siRNA antisense strand against b2GPI
gauaaaacccaguguuacaag

SEQ ID NO: 1566 - RNA, 21 nt, Artificial Seqence
  siRNA antisense strand against b2GPI
agauaaaacccaguguuacaa

SEQ ID NO: 1567 - RNA, 21 nt, Artificial Seqence
  siRNA antisense strand against b2GPI
cagauaaaacccaguguuaca

SEQ ID NO: 1568 - RNA, 21 nt, Artificial Seqence
  siRNA antisense strand against b2GPI
ucagauaaaacccaguguuac

SEQ ID NO: 1569 - RNA, 21 nt, Artificial Seqence
  siRNA antisense strand against b2GPI
uucagauaaaacccaguguua

SEQ ID NO: 1570 - RNA, 21 nt, Artificial Seqence
  siRNA antisense strand against b2GPI
auucagauaaaacccaguguu

SEQ ID NO: 1571 - RNA, 21 nt, Artificial Seqence
  siRNA antisense strand against b2GPI
cauucagauaaaacccagugu

SEQ ID NO: 1572 - RNA, 21 nt, Artificial Seqence
  siRNA antisense strand against b2GPI
ccauucagauaaaacccagug

SEQ ID NO: 1573 - RNA, 21 nt, Artificial Seqence
  siRNA antisense strand against b2GPI
gccauucagauaaaacccagu

SEQ ID NO: 1574 - RNA, 21 nt, Artificial Seqence
  siRNA antisense strand against b2GPI
cgccauucagauaaaacccag

SEQ ID NO: 1575 - RNA, 21 nt, Artificial Seqence
  siRNA antisense strand against b2GPI
gcgccauucagauaaaaccca

SEQ ID NO: 1576 - RNA, 21 nt, Artificial Seqence
  siRNA antisense strand against b2GPI
agcgccauucagauaaaaccc

SEQ ID NO: 1577 - RNA, 21 nt, Artificial Seqence
  siRNA antisense strand against b2GPI
cagcgccauucagauaaaacc

SEQ ID NO: 1578 - RNA, 21 nt, Artificial Seqence
  siRNA antisense strand against b2GPI
ucagcgccauucagauaaaac

SEQ ID NO: 1579 - RNA, 21 nt, Artificial Seqence
  siRNA antisense strand against b2GPI
aucagcgccauucagauaaaa

SEQ ID NO: 1580 - RNA, 21 nt, Artificial Seqence
  siRNA antisense strand against b2GPI
aaucagcgccauucagauaaa

SEQ ID NO: 1581 - RNA, 21 nt, Artificial Seqence
  siRNA antisense strand against b2GPI
gaaucagcgccauucagauaa

SEQ ID NO: 1582 - RNA, 21 nt, Artificial Seqence
  siRNA antisense strand against b2GPI
agaaucagcgccauucagaua

SEQ ID NO: 1583 - RNA, 21 nt, Artificial Seqence
  siRNA antisense strand against b2GPI
cagaaucagcgccauucagau

SEQ ID NO: 1584 - RNA, 21 nt, Artificial Seqence
  siRNA antisense strand against b2GPI
gcagaaucagcgccauucaga

SEQ ID NO: 1585 - RNA, 21 nt, Artificial Seqence
  siRNA antisense strand against b2GPI
ggcagaaucagcgccauucag

SEQ ID NO: 1586 - RNA, 21 nt, Artificial Seqence
  siRNA antisense strand against b2GPI
uggcagaaucagcgccauuca

SEQ ID NO: 1587 - RNA, 21 nt, Artificial Seqence
  siRNA antisense strand against b2GPI
uuggcagaaucagcgccauuc

SEQ ID NO: 1588 - RNA, 21 nt, Artificial Seqence
  siRNA antisense strand against b2GPI
cuuggcagaaucagcgccauu

SEQ ID NO: 1589 - RNA, 21 nt, Artificial Seqence
  siRNA antisense strand against b2GPI
acuuggcagaaucagcgccau

SEQ ID NO: 1590 - RNA, 21 nt, Artificial Seqence
  siRNA antisense strand against b2GPI
cacuuggcagaaucagcgcca

SEQ ID NO: 1591 - RNA, 21 nt, Artificial Seqence
  siRNA antisense strand against b2GPI
gcacuuggcagaaucagcgcc

SEQ ID NO: 1592 - RNA, 21 nt, Artificial Seqence
  siRNA antisense strand against b2GPI
ugcacuuggcagaaucagcgc

SEQ ID NO: 1593 - RNA, 21 nt, Artificial Seqence
  siRNA antisense strand against b2GPI
gugcacuuggcagaaucagcg

SEQ ID NO: 1594 - RNA, 21 nt, Artificial Seqence
  siRNA antisense strand against b2GPI
agugcacuuggcagaaucagc

SEQ ID NO: 1595 - RNA, 21 nt, Artificial Seqence
  siRNA antisense strand against b2GPI
cagugcacuuggcagaaucag

SEQ ID NO: 1596 - RNA, 21 nt, Artificial Seqence
  siRNA antisense strand against b2GPI
ucagugcacuuggcagaauca

SEQ ID NO: 1597 - RNA, 21 nt, Artificial Seqence
  siRNA antisense strand against b2GPI
cucagugcacuuggcagaauc

SEQ ID NO: 1598 - RNA, 21 nt, Artificial Seqence
  siRNA antisense strand against b2GPI
ccucagugcacuuggcagaau

SEQ ID NO: 1599 - RNA, 21 nt, Artificial Seqence
  siRNA antisense strand against b2GPI
uccucagugcacuuggcagaa

SEQ ID NO: 1600 - RNA, 21 nt, Artificial Seqence
  siRNA antisense strand against b2GPI
uuccucagugcacuuggcaga

SEQ ID NO: 1601 - RNA, 21 nt, Artificial Seqence
  siRNA antisense strand against b2GPI
cuuccucagugcacuuggcag

SEQ ID NO: 1602 - RNA, 21 nt, Artificial Seqence
  siRNA antisense strand against b2GPI
ccuuccucagugcacuuggca

SEQ ID NO: 1603 - RNA, 21 nt, Artificial Seqence
  siRNA antisense strand against b2GPI
uccuuccucagugcacuuggc

SEQ ID NO: 1604 - RNA, 21 nt, Artificial Seqence
  siRNA antisense strand against b2GPI
uuccuuccucagugcacuugg

SEQ ID NO: 1605 - RNA, 21 nt, Artificial Seqence
  siRNA antisense strand against b2GPI
uuuccuuccucagugcacuug

SEQ ID NO: 1606 - RNA, 21 nt, Artificial Seqence
  siRNA antisense strand against b2GPI
uuuuccuuccucagugcacuu

SEQ ID NO: 1607 - RNA, 21 nt, Artificial Seqence
  siRNA antisense strand against b2GPI
auuuuccuuccucagugcacu

SEQ ID NO: 1608 - RNA, 21 nt, Artificial Seqence
  siRNA antisense strand against b2GPI
cauuuuccuuccucagugcac

SEQ ID NO: 1609 - RNA, 21 nt, Artificial Seqence
  siRNA antisense strand against b2GPI
ccauuuuccuuccucagugca

SEQ ID NO: 1610 - RNA, 21 nt, Artificial Seqence
  siRNA antisense strand against b2GPI
uccauuuuccuuccucagugc

SEQ ID NO: 1611 - RNA, 21 nt, Artificial Seqence
  siRNA antisense strand against b2GPI
cuccauuuuccuuccucagug

SEQ ID NO: 1612 - RNA, 21 nt, Artificial Seqence
  siRNA antisense strand against b2GPI
gcuccauuuuccuuccucagu

SEQ ID NO: 1613 - RNA, 21 nt, Artificial Seqence
  siRNA antisense strand against b2GPI
ggcuccauuuuccuuccucag

SEQ ID NO: 1614 - RNA, 21 nt, Artificial Seqence
  siRNA antisense strand against b2GPI
gggcuccauuuuccuuccuca

SEQ ID NO: 1615 - RNA, 21 nt, Artificial Seqence
  siRNA antisense strand against b2GPI
cgggcuccauuuuccuuccuc

SEQ ID NO: 1616 - RNA, 21 nt, Artificial Seqence
  siRNA antisense strand against b2GPI
ccgggcuccauuuuccuuccu

SEQ ID NO: 1617 - RNA, 21 nt, Artificial Seqence
  siRNA antisense strand against b2GPI
uccgggcuccauuuuccuucc

SEQ ID NO: 1618 - RNA, 21 nt, Artificial Seqence
  siRNA antisense strand against b2GPI
cuccgggcuccauuuuccuuc

SEQ ID NO: 1619 - RNA, 21 nt, Artificial Seqence
  siRNA antisense strand against b2GPI
gcuccgggcuccauuuuccuu

SEQ ID NO: 1620 - RNA, 21 nt, Artificial Seqence
  siRNA antisense strand against b2GPI
agcuccgggcuccauuuuccu

SEQ ID NO: 1621 - RNA, 21 nt, Artificial Seqence
  siRNA antisense strand against b2GPI
aagcuccgggcuccauuuucc

SEQ ID NO: 1622 - RNA, 21 nt, Artificial Seqence
  siRNA antisense strand against b2GPI
gaagcuccgggcuccauuuuc

SEQ ID NO: 1623 - RNA, 21 nt, Artificial Seqence
  siRNA antisense strand against b2GPI
ggaagcuccgggcuccauuuu

SEQ ID NO: 1624 - RNA, 21 nt, Artificial Seqence
  siRNA antisense strand against b2GPI
aggaagcuccgggcuccauuu

SEQ ID NO: 1625 - RNA, 21 nt, Artificial Seqence
  siRNA antisense strand against b2GPI
caggaagcuccgggcuccauu

SEQ ID NO: 1626 - RNA, 21 nt, Artificial Seqence
  siRNA antisense strand against b2GPI
acaggaagcuccgggcuccau

SEQ ID NO: 1627 - RNA, 21 nt, Artificial Seqence
  siRNA antisense strand against b2GPI
gacaggaagcuccgggcucca

SEQ ID NO: 1628 - RNA, 21 nt, Artificial Seqence
  siRNA antisense strand against b2GPI
agacaggaagcuccgggcucc

SEQ ID NO: 1629 - RNA, 21 nt, Artificial Seqence
  siRNA antisense strand against b2GPI
cagacaggaagcuccgggcuc

SEQ ID NO: 1630 - RNA, 21 nt, Artificial Seqence
  siRNA antisense strand against b2GPI
acagacaggaagcuccgggcu

SEQ ID NO: 1631 - RNA, 21 nt, Artificial Seqence
  siRNA antisense strand against b2GPI
cacagacaggaagcuccgggc

SEQ ID NO: 1632 - RNA, 21 nt, Artificial Seqence
  siRNA antisense strand against b2GPI
gcacagacaggaagcuccggg

SEQ ID NO: 1633 - RNA, 21 nt, Artificial Seqence
  siRNA antisense strand against b2GPI
agcacagacaggaagcuccgg

SEQ ID NO: 1634 - RNA, 21 nt, Artificial Seqence
  siRNA antisense strand against b2GPI
gagcacagacaggaagcuccg

SEQ ID NO: 1635 - RNA, 21 nt, Artificial Seqence
  siRNA antisense strand against b2GPI
ggagcacagacaggaagcucc

SEQ ID NO: 1636 - RNA, 21 nt, Artificial Seqence
  siRNA antisense strand against b2GPI
gggagcacagacaggaagcuc

SEQ ID NO: 1637 - RNA, 21 nt, Artificial Seqence
  siRNA antisense strand against b2GPI
ugggagcacagacaggaagcu

SEQ ID NO: 1638 - RNA, 21 nt, Artificial Seqence
  siRNA antisense strand against b2GPI
augggagcacagacaggaagc

SEQ ID NO: 1639 - RNA, 21 nt, Artificial Seqence
  siRNA antisense strand against b2GPI
gaugggagcacagacaggaag

SEQ ID NO: 1640 - RNA, 21 nt, Artificial Seqence
  siRNA antisense strand against b2GPI
ugaugggagcacagacaggaa

SEQ ID NO: 1641 - RNA, 21 nt, Artificial Seqence
  siRNA antisense strand against b2GPI
augaugggagcacagacagga

SEQ ID NO: 1642 - RNA, 21 nt, Artificial Seqence
  siRNA antisense strand against b2GPI
gaugaugggagcacagacagg

SEQ ID NO: 1643 - RNA, 21 nt, Artificial Seqence
  siRNA antisense strand against b2GPI
agaugaugggagcacagacag

SEQ ID NO: 1644 - RNA, 21 nt, Artificial Seqence
  siRNA antisense strand against b2GPI
cagaugaugggagcacagaca

SEQ ID NO: 1645 - RNA, 21 nt, Artificial Seqence
  siRNA antisense strand against b2GPI
gcagaugaugggagcacagac

SEQ ID NO: 1646 - RNA, 21 nt, Artificial Seqence
  siRNA antisense strand against b2GPI
ggcagaugaugggagcacaga

SEQ ID NO: 1647 - RNA, 21 nt, Artificial Seqence
  siRNA antisense strand against b2GPI
gggcagaugaugggagcacag

SEQ ID NO: 1648 - RNA, 21 nt, Artificial Seqence
  siRNA antisense strand against b2GPI
agggcagaugaugggagcaca

SEQ ID NO: 1649 - RNA, 21 nt, Artificial Seqence
  siRNA antisense strand against b2GPI
gagggcagaugaugggagcac

SEQ ID NO: 1650 - RNA, 21 nt, Artificial Seqence
  siRNA antisense strand against b2GPI
ggagggcagaugaugggagca

SEQ ID NO: 1651 - RNA, 21 nt, Artificial Seqence
  siRNA antisense strand against b2GPI
uggagggcagaugaugggagc

SEQ ID NO: 1652 - RNA, 21 nt, Artificial Seqence
  siRNA antisense strand against b2GPI
guggagggcagaugaugggag

SEQ ID NO: 1653 - RNA, 21 nt, Artificial Seqence
  siRNA antisense strand against b2GPI
gguggagggcagaugauggga

SEQ ID NO: 1654 - RNA, 21 nt, Artificial Seqence
  siRNA antisense strand against b2GPI
ugguggagggcagaugauggg

SEQ ID NO: 1655 - RNA, 21 nt, Artificial Seqence
  siRNA antisense strand against b2GPI
augguggagggcagaugaugg

SEQ ID NO: 1656 - RNA, 21 nt, Artificial Seqence
  siRNA antisense strand against b2GPI
gaugguggagggcagaugaug

SEQ ID NO: 1657 - RNA, 21 nt, Artificial Seqence
  siRNA antisense strand against b2GPI
ggaugguggagggcagaugau

SEQ ID NO: 1658 - RNA, 21 nt, Artificial Seqence
  siRNA antisense strand against b2GPI
uggaugguggagggcagauga

SEQ ID NO: 1659 - RNA, 21 nt, Artificial Seqence
  siRNA antisense strand against b2GPI
auggaugguggagggcagaug

SEQ ID NO: 1660 - RNA, 21 nt, Artificial Seqence
  siRNA antisense strand against b2GPI
uauggaugguggagggcagau

SEQ ID NO: 1661 - RNA, 21 nt, Artificial Seqence
  siRNA antisense strand against b2GPI
guauggaugguggagggcaga

SEQ ID NO: 1662 - RNA, 21 nt, Artificial Seqence
  siRNA antisense strand against b2GPI
gguauggaugguggagggcag

SEQ ID NO: 1663 - RNA, 21 nt, Artificial Seqence
  siRNA antisense strand against b2GPI
agguauggaugguggagggca

SEQ ID NO: 1664 - RNA, 21 nt, Artificial Seqence
  siRNA antisense strand against b2GPI
uagguauggaugguggagggc

SEQ ID NO: 1665 - RNA, 21 nt, Artificial Seqence
  siRNA antisense strand against b2GPI
guagguauggaugguggaggg

SEQ ID NO: 1666 - RNA, 21 nt, Artificial Seqence
  siRNA antisense strand against b2GPI
cguagguauggaugguggagg

SEQ ID NO: 1667 - RNA, 21 nt, Artificial Seqence
  siRNA antisense strand against b2GPI
acguagguauggaugguggag

SEQ ID NO: 1668 - RNA, 21 nt, Artificial Seqence
  siRNA antisense strand against b2GPI
aacguagguauggauggugga

SEQ ID NO: 1669 - RNA, 21 nt, Artificial Seqence
  siRNA antisense strand against b2GPI
aaacguagguauggauggugg

SEQ ID NO: 1670 - RNA, 21 nt, Artificial Seqence
  siRNA antisense strand against b2GPI
caaacguagguauggauggug

SEQ ID NO: 1671 - RNA, 21 nt, Artificial Seqence
  siRNA antisense strand against b2GPI
gcaaacguagguauggauggu

SEQ ID NO: 1672 - RNA, 21 nt, Artificial Seqence
  siRNA antisense strand against b2GPI
ugcaaacguagguauggaugg

SEQ ID NO: 1673 - RNA, 21 nt, Artificial Seqence
  siRNA antisense strand against b2GPI
uugcaaacguagguauggaug

SEQ ID NO: 1674 - RNA, 21 nt, Artificial Seqence
  siRNA antisense strand against b2GPI
guugcaaacguagguauggau

SEQ ID NO: 1675 - RNA, 21 nt, Artificial Seqence
  siRNA antisense strand against b2GPI
uguugcaaacguagguaugga

SEQ ID NO: 1676 - RNA, 21 nt, Artificial Seqence
  siRNA antisense strand against b2GPI
guguugcaaacguagguaugg

SEQ ID NO: 1677 - RNA, 21 nt, Artificial Seqence
  siRNA antisense strand against b2GPI
aguguugcaaacguagguaug

SEQ ID NO: 1678 - RNA, 21 nt, Artificial Seqence
  siRNA antisense strand against b2GPI
aaguguugcaaacguagguau

SEQ ID NO: 1679 - RNA, 21 nt, Artificial Seqence
  siRNA antisense strand against b2GPI
gaaguguugcaaacguaggua

SEQ ID NO: 1680 - RNA, 21 nt, Artificial Seqence
  siRNA antisense strand against b2GPI
cgaaguguugcaaacguaggu

SEQ ID NO: 1681 - RNA, 21 nt, Artificial Seqence
  siRNA antisense strand against b2GPI
acgaaguguugcaaacguagg

SEQ ID NO: 1682 - RNA, 21 nt, Artificial Seqence
  siRNA antisense strand against b2GPI
cacgaaguguugcaaacguag

SEQ ID NO: 1683 - RNA, 21 nt, Artificial Seqence
  siRNA antisense strand against b2GPI
acacgaaguguugcaaacgua

SEQ ID NO: 1684 - RNA, 21 nt, Artificial Seqence
  siRNA antisense strand against b2GPI
aacacgaaguguugcaaacgu

SEQ ID NO: 1685 - RNA, 21 nt, Artificial Seqence
  siRNA antisense strand against b2GPI
aaacacgaaguguugcaaacg

SEQ ID NO: 1686 - RNA, 21 nt, Artificial Seqence
  siRNA antisense strand against b2GPI
uaaacacgaaguguugcaaac

SEQ ID NO: 1687 - RNA, 21 nt, Artificial Seqence
  siRNA antisense strand against b2GPI
auaaacacgaaguguugcaaa

SEQ ID NO: 1688 - RNA, 21 nt, Artificial Seqence
  siRNA antisense strand against b2GPI
uauaaacacgaaguguugcaa

SEQ ID NO: 1689 - RNA, 21 nt, Artificial Seqence
  siRNA antisense strand against b2GPI
uuauaaacacgaaguguugca

SEQ ID NO: 1690 - RNA, 21 nt, Artificial Seqence
  siRNA antisense strand against b2GPI
cuuauaaacacgaaguguugc

SEQ ID NO: 1691 - RNA, 21 nt, Artificial Seqence
  siRNA antisense strand against b2GPI
gcuuauaaacacgaaguguug

SEQ ID NO: 1692 - RNA, 21 nt, Artificial Seqence
  siRNA antisense strand against b2GPI
ggcuuauaaacacgaaguguu

SEQ ID NO: 1693 - RNA, 21 nt, Artificial Seqence
  siRNA antisense strand against b2GPI
uggcuuauaaacacgaagugu

SEQ ID NO: 1694 - RNA, 21 nt, Artificial Seqence
  siRNA antisense strand against b2GPI
auggcuuauaaacacgaagug

SEQ ID NO: 1695 - RNA, 21 nt, Artificial Seqence
  siRNA antisense strand against b2GPI
gauggcuuauaaacacgaagu

SEQ ID NO: 1696 - RNA, 21 nt, Artificial Seqence
  siRNA antisense strand against b2GPI
ugauggcuuauaaacacgaag

SEQ ID NO: 1697 - RNA, 21 nt, Artificial Seqence
  siRNA antisense strand against b2GPI
cugauggcuuauaaacacgaa

SEQ ID NO: 1698 - RNA, 21 nt, Artificial Seqence
  siRNA antisense strand against b2GPI
gcugauggcuuauaaacacga

SEQ ID NO: 1699 - RNA, 21 nt, Artificial Seqence
  siRNA antisense strand against b2GPI
agcugauggcuuauaaacacg

SEQ ID NO: 1700 - RNA, 21 nt, Artificial Seqence
  siRNA antisense strand against b2GPI
cagcugauggcuuauaaacac

SEQ ID NO: 1701 - RNA, 21 nt, Artificial Seqence
  siRNA antisense strand against b2GPI
ccagcugauggcuuauaaaca

SEQ ID NO: 1702 - RNA, 21 nt, Artificial Seqence
  siRNA antisense strand against b2GPI
uccagcugauggcuuauaaac

SEQ ID NO: 1703 - RNA, 21 nt, Artificial Seqence
  siRNA antisense strand against b2GPI
uuccagcugauggcuuauaaa

SEQ ID NO: 1704 - RNA, 21 nt, Artificial Seqence
  siRNA antisense strand against b2GPI
uuuccagcugauggcuuauaa

SEQ ID NO: 1705 - RNA, 21 nt, Artificial Seqence
  siRNA antisense strand against b2GPI
guuuccagcugauggcuuaua

SEQ ID NO: 1706 - RNA, 21 nt, Artificial Seqence
  siRNA antisense strand against b2GPI
uguuuccagcugauggcuuau

SEQ ID NO: 1707 - RNA, 21 nt, Artificial Seqence
  siRNA antisense strand against b2GPI
uuguuuccagcugauggcuua

SEQ ID NO: 1708 - RNA, 21 nt, Artificial Seqence
  siRNA antisense strand against b2GPI
auuguuuccagcugauggcuu

SEQ ID NO: 1709 - RNA, 21 nt, Artificial Seqence
  siRNA antisense strand against b2GPI
aauuguuuccagcugauggcu

SEQ ID NO: 1710 - RNA, 21 nt, Artificial Seqence
  siRNA antisense strand against b2GPI
gaauuguuuccagcugauggc

SEQ ID NO: 1711 - RNA, 21 nt, Artificial Seqence
  siRNA antisense strand against b2GPI
ggaauuguuuccagcugaugg

SEQ ID NO: 1712 - RNA, 21 nt, Artificial Seqence
  siRNA antisense strand against b2GPI
gggaauuguuuccagcugaug

SEQ ID NO: 1713 - RNA, 21 nt, Artificial Seqence
  siRNA antisense strand against b2GPI
agggaauuguuuccagcugau

SEQ ID NO: 1714 - RNA, 21 nt, Artificial Seqence
  siRNA antisense strand against b2GPI
gagggaauuguuuccagcuga

SEQ ID NO: 1715 - RNA, 21 nt, Artificial Seqence
  siRNA antisense strand against b2GPI
agagggaauuguuuccagcug

SEQ ID NO: 1716 - RNA, 21 nt, Artificial Seqence
  siRNA antisense strand against b2GPI
uagagggaauuguuuccagcu

SEQ ID NO: 1717 - RNA, 21 nt, Artificial Seqence
  siRNA antisense strand against b2GPI
auagagggaauuguuuccagc

SEQ ID NO: 1718 - RNA, 21 nt, Artificial Seqence
  siRNA antisense strand against b2GPI
gauagagggaauuguuuccag

SEQ ID NO: 1719 - RNA, 21 nt, Artificial Seqence
  siRNA antisense strand against b2GPI
cgauagagggaauuguuucca

SEQ ID NO: 1720 - RNA, 21 nt, Artificial Seqence
  siRNA antisense strand against b2GPI
ccgauagagggaauuguuucc

SEQ ID NO: 1721 - RNA, 21 nt, Artificial Seqence
  siRNA antisense strand against b2GPI
cccgauagagggaauuguuuc

SEQ ID NO: 1722 - RNA, 21 nt, Artificial Seqence
  siRNA antisense strand against b2GPI
ucccgauagagggaauuguuu

SEQ ID NO: 1723 - RNA, 21 nt, Artificial Seqence
  siRNA antisense strand against b2GPI
gucccgauagagggaauuguu

SEQ ID NO: 1724 - RNA, 21 nt, Artificial Seqence
  siRNA antisense strand against b2GPI
ugucccgauagagggaauugu

SEQ ID NO: 1725 - RNA, 21 nt, Artificial Seqence
  siRNA antisense strand against b2GPI
gugucccgauagagggaauug

SEQ ID NO: 1726 - RNA, 21 nt, Artificial Seqence
  siRNA antisense strand against b2GPI
ugugucccgauagagggaauu

SEQ ID NO: 1727 - RNA, 21 nt, Artificial Seqence
  siRNA antisense strand against b2GPI
cugugucccgauagagggaau

SEQ ID NO: 1728 - RNA, 21 nt, Artificial Seqence
  siRNA antisense strand against b2GPI
gcugugucccgauagagggaa

SEQ ID NO: 1729 - RNA, 21 nt, Artificial Seqence
  siRNA antisense strand against b2GPI
ugcugugucccgauagaggga

SEQ ID NO: 1730 - RNA, 21 nt, Artificial Seqence
  siRNA antisense strand against b2GPI
cugcugugucccgauagaggg

SEQ ID NO: 1731 - RNA, 21 nt, Artificial Seqence
  siRNA antisense strand against b2GPI
acugcugugucccgauagagg

SEQ ID NO: 1732 - RNA, 21 nt, Artificial Seqence
  siRNA antisense strand against b2GPI
aacugcugugucccgauagag

SEQ ID NO: 1733 - RNA, 21 nt, Artificial Seqence
  siRNA antisense strand against b2GPI
aaacugcugugucccgauaga

SEQ ID NO: 1734 - RNA, 21 nt, Artificial Seqence
  siRNA antisense strand against b2GPI
aaaacugcugugucccgauag

SEQ ID NO: 1735 - RNA, 21 nt, Artificial Seqence
  siRNA antisense strand against b2GPI
aaaaacugcugugucccgaua

SEQ ID NO: 1736 - RNA, 21 nt, Artificial Seqence
  siRNA antisense strand against b2GPI
caaaaacugcugugucccgau

SEQ ID NO: 1737 - RNA, 21 nt, Artificial Seqence
  siRNA antisense strand against b2GPI
ucaaaaacugcugugucccga

SEQ ID NO: 1738 - RNA, 21 nt, Artificial Seqence
  siRNA antisense strand against b2GPI
uucaaaaacugcugugucccg

SEQ ID NO: 1739 - RNA, 21 nt, Artificial Seqence
  siRNA antisense strand against b2GPI
auucaaaaacugcuguguccc

SEQ ID NO: 1740 - RNA, 21 nt, Artificial Seqence
  siRNA antisense strand against b2GPI
cauucaaaaacugcugugucc

SEQ ID NO: 1741 - RNA, 21 nt, Artificial Seqence
  siRNA antisense strand against b2GPI
acauucaaaaacugcuguguc

SEQ ID NO: 1742 - RNA, 21 nt, Artificial Seqence
  siRNA antisense strand against b2GPI
aacauucaaaaacugcugugu

SEQ ID NO: 1743 - RNA, 21 nt, Artificial Seqence
  siRNA antisense strand against b2GPI
aaacauucaaaaacugcugug

SEQ ID NO: 1744 - RNA, 21 nt, Artificial Seqence
  siRNA antisense strand against b2GPI
caaacauucaaaaacugcugu

SEQ ID NO: 1745 - RNA, 21 nt, Artificial Seqence
  siRNA antisense strand against b2GPI
gcaaacauucaaaaacugcug

SEQ ID NO: 1746 - RNA, 21 nt, Artificial Seqence
  siRNA antisense strand against b2GPI
ggcaaacauucaaaaacugcu

SEQ ID NO: 1747 - RNA, 21 nt, Artificial Seqence
  siRNA antisense strand against b2GPI
uggcaaacauucaaaaacugc

SEQ ID NO: 1748 - RNA, 21 nt, Artificial Seqence
  siRNA antisense strand against b2GPI
guggcaaacauucaaaaacug

SEQ ID NO: 1749 - RNA, 21 nt, Artificial Seqence
  siRNA antisense strand against b2GPI
uguggcaaacauucaaaaacu

SEQ ID NO: 1750 - RNA, 21 nt, Artificial Seqence
  siRNA antisense strand against b2GPI
uuguggcaaacauucaaaaac

SEQ ID NO: 1751 - RNA, 21 nt, Artificial Seqence
  siRNA antisense strand against b2GPI
guuguggcaaacauucaaaaa

SEQ ID NO: 1752 - RNA, 21 nt, Artificial Seqence
  siRNA antisense strand against b2GPI
uguuguggcaaacauucaaaa

SEQ ID NO: 1753 - RNA, 21 nt, Artificial Seqence
  siRNA antisense strand against b2GPI
auguuguggcaaacauucaaa

SEQ ID NO: 1754 - RNA, 21 nt, Artificial Seqence
  siRNA antisense strand against b2GPI
cauguuguggcaaacauucaa

SEQ ID NO: 1755 - RNA, 21 nt, Artificial Seqence
  siRNA antisense strand against b2GPI
gcauguuguggcaaacauuca

SEQ ID NO: 1756 - RNA, 21 nt, Artificial Seqence
  siRNA antisense strand against b2GPI
cgcauguuguggcaaacauuc

SEQ ID NO: 1757 - RNA, 21 nt, Artificial Seqence
  siRNA antisense strand against b2GPI
ucgcauguuguggcaaacauu

SEQ ID NO: 1758 - RNA, 21 nt, Artificial Seqence
  siRNA antisense strand against b2GPI
aucgcauguuguggcaaacau

SEQ ID NO: 1759 - RNA, 21 nt, Artificial Seqence
  siRNA antisense strand against b2GPI
caucgcauguuguggcaaaca

SEQ ID NO: 1760 - RNA, 21 nt, Artificial Seqence
  siRNA antisense strand against b2GPI
acaucgcauguuguggcaaac

SEQ ID NO: 1761 - RNA, 21 nt, Artificial Seqence
  siRNA antisense strand against b2GPI
aacaucgcauguuguggcaaa

SEQ ID NO: 1762 - RNA, 21 nt, Artificial Seqence
  siRNA antisense strand against b2GPI
aaacaucgcauguuguggcaa

SEQ ID NO: 1763 - RNA, 21 nt, Artificial Seqence
  siRNA antisense strand against b2GPI
caaacaucgcauguuguggca

SEQ ID NO: 1764 - RNA, 21 nt, Artificial Seqence
  siRNA antisense strand against b2GPI
ccaaacaucgcauguuguggc

SEQ ID NO: 1765 - RNA, 21 nt, Artificial Seqence
  siRNA antisense strand against b2GPI
uccaaacaucgcauguugugg

SEQ ID NO: 1766 - RNA, 21 nt, Artificial Seqence
  siRNA antisense strand against b2GPI
uuccaaacaucgcauguugug

SEQ ID NO: 1767 - RNA, 21 nt, Artificial Seqence
  siRNA antisense strand against b2GPI
uuuccaaacaucgcauguugu

SEQ ID NO: 1768 - RNA, 21 nt, Artificial Seqence
  siRNA antisense strand against b2GPI
auuuccaaacaucgcauguug

SEQ ID NO: 1769 - RNA, 21 nt, Artificial Seqence
  siRNA antisense strand against b2GPI
cauuuccaaacaucgcauguu

SEQ ID NO: 1770 - RNA, 21 nt, Artificial Seqence
  siRNA antisense strand against b2GPI
ucauuuccaaacaucgcaugu

SEQ ID NO: 1771 - RNA, 21 nt, Artificial Seqence
  siRNA antisense strand against b2GPI
aucauuuccaaacaucgcaug

SEQ ID NO: 1772 - RNA, 21 nt, Artificial Seqence
  siRNA antisense strand against b2GPI
uaucauuuccaaacaucgcau

SEQ ID NO: 1773 - RNA, 21 nt, Artificial Seqence
  siRNA antisense strand against b2GPI
guaucauuuccaaacaucgca

SEQ ID NO: 1774 - RNA, 21 nt, Artificial Seqence
  siRNA antisense strand against b2GPI
uguaucauuuccaaacaucgc

SEQ ID NO: 1775 - RNA, 21 nt, Artificial Seqence
  siRNA antisense strand against b2GPI
uuguaucauuuccaaacaucg

SEQ ID NO: 1776 - RNA, 21 nt, Artificial Seqence
  siRNA antisense strand against b2GPI
auuguaucauuuccaaacauc

SEQ ID NO: 1777 - RNA, 21 nt, Artificial Seqence
  siRNA antisense strand against b2GPI
aauuguaucauuuccaaacau

SEQ ID NO: 1778 - RNA, 21 nt, Artificial Seqence
  siRNA antisense strand against b2GPI
uaauuguaucauuuccaaaca

SEQ ID NO: 1779 - RNA, 21 nt, Artificial Seqence
  siRNA antisense strand against b2GPI
guaauuguaucauuuccaaac

SEQ ID NO: 1780 - RNA, 21 nt, Artificial Seqence
  siRNA antisense strand against b2GPI
gguaauuguaucauuuccaaa

SEQ ID NO: 1781 - RNA, 21 nt, Artificial Seqence
  siRNA antisense strand against b2GPI
agguaauuguaucauuuccaa

SEQ ID NO: 1782 - RNA, 21 nt, Artificial Seqence
  siRNA antisense strand against b2GPI
cagguaauuguaucauuucca

SEQ ID NO: 1783 - RNA, 21 nt, Artificial Seqence
  siRNA antisense strand against b2GPI
gcagguaauuguaucauuucc

SEQ ID NO: 1784 - RNA, 21 nt, Artificial Seqence
  siRNA antisense strand against b2GPI
ugcagguaauuguaucauuuc

SEQ ID NO: 1785 - RNA, 21 nt, Artificial Seqence
  siRNA antisense strand against b2GPI
gugcagguaauuguaucauuu

SEQ ID NO: 1786 - RNA, 21 nt, Artificial Seqence
  siRNA antisense strand against b2GPI
cgugcagguaauuguaucauu

SEQ ID NO: 1787 - RNA, 21 nt, Artificial Seqence
  siRNA antisense strand against b2GPI
ucgugcagguaauuguaucau

SEQ ID NO: 1788 - RNA, 21 nt, Artificial Seqence
  siRNA antisense strand against b2GPI
gucgugcagguaauuguauca

SEQ ID NO: 1789 - RNA, 21 nt, Artificial Seqence
  siRNA antisense strand against b2GPI
ugucgugcagguaauuguauc

SEQ ID NO: 1790 - RNA, 21 nt, Artificial Seqence
  siRNA antisense strand against b2GPI
gugucgugcagguaauuguau

SEQ ID NO: 1791 - RNA, 21 nt, Artificial Seqence
  siRNA antisense strand against b2GPI
ugugucgugcagguaauugua

SEQ ID NO: 1792 - RNA, 21 nt, Artificial Seqence
  siRNA antisense strand against b2GPI
augugucgugcagguaauugu

SEQ ID NO: 1793 - RNA, 21 nt, Artificial Seqence
  siRNA antisense strand against b2GPI
caugugucgugcagguaauug

SEQ ID NO: 1794 - RNA, 21 nt, Artificial Seqence
  siRNA antisense strand against b2GPI
ccaugugucgugcagguaauu

SEQ ID NO: 1795 - RNA, 21 nt, Artificial Seqence
  siRNA antisense strand against b2GPI
uccaugugucgugcagguaau

SEQ ID NO: 1796 - RNA, 21 nt, Artificial Seqence
  siRNA antisense strand against b2GPI
uuccaugugucgugcagguaa

SEQ ID NO: 1797 - RNA, 21 nt, Artificial Seqence
  siRNA antisense strand against b2GPI
uuuccaugugucgugcaggua

SEQ ID NO: 1798 - RNA, 21 nt, Artificial Seqence
  siRNA antisense strand against b2GPI
auuuccaugugucgugcaggu

SEQ ID NO: 1799 - RNA, 21 nt, Artificial Seqence
  siRNA antisense strand against b2GPI
aauuuccaugugucgugcagg

SEQ ID NO: 1800 - RNA, 21 nt, Artificial Seqence
  siRNA antisense strand against b2GPI
caauuuccaugugucgugcag

SEQ ID NO: 1801 - RNA, 21 nt, Artificial Seqence
  siRNA antisense strand against b2GPI
ccaauuuccaugugucgugca

SEQ ID NO: 1802 - RNA, 21 nt, Artificial Seqence
  siRNA antisense strand against b2GPI
uccaauuuccaugugucgugc

SEQ ID NO: 1803 - RNA, 21 nt, Artificial Seqence
  siRNA antisense strand against b2GPI
guccaauuuccaugugucgug

SEQ ID NO: 1804 - RNA, 21 nt, Artificial Seqence
  siRNA antisense strand against b2GPI
aguccaauuuccaugugucgu

SEQ ID NO: 1805 - RNA, 21 nt, Artificial Seqence
  siRNA antisense strand against b2GPI
uaguccaauuuccaugugucg

SEQ ID NO: 1806 - RNA, 21 nt, Artificial Seqence
  siRNA antisense strand against b2GPI
uuaguccaauuuccauguguc

SEQ ID NO: 1807 - RNA, 21 nt, Artificial Seqence
  siRNA antisense strand against b2GPI
uuuaguccaauuuccaugugu

SEQ ID NO: 1808 - RNA, 21 nt, Artificial Seqence
  siRNA antisense strand against b2GPI
auuuaguccaauuuccaugug

SEQ ID NO: 1809 - RNA, 21 nt, Artificial Seqence
  siRNA antisense strand against b2GPI
aauuuaguccaauuuccaugu

SEQ ID NO: 1810 - RNA, 21 nt, Artificial Seqence
  siRNA antisense strand against b2GPI
uaauuuaguccaauuuccaug

SEQ ID NO: 1811 - RNA, 21 nt, Artificial Seqence
  siRNA antisense strand against b2GPI
guaauuuaguccaauuuccau

SEQ ID NO: 1812 - RNA, 21 nt, Artificial Seqence
  siRNA antisense strand against b2GPI
gguaauuuaguccaauuucca

SEQ ID NO: 1813 - RNA, 21 nt, Artificial Seqence
  siRNA antisense strand against b2GPI
ugguaauuuaguccaauuucc

SEQ ID NO: 1814 - RNA, 21 nt, Artificial Seqence
  siRNA antisense strand against b2GPI
cugguaauuuaguccaauuuc

SEQ ID NO: 1815 - RNA, 21 nt, Artificial Seqence
  siRNA antisense strand against b2GPI
ucugguaauuuaguccaauuu

SEQ ID NO: 1816 - RNA, 21 nt, Artificial Seqence
  siRNA antisense strand against b2GPI
uucugguaauuuaguccaauu

SEQ ID NO: 1817 - RNA, 21 nt, Artificial Seqence
  siRNA antisense strand against b2GPI
auucugguaauuuaguccaau

SEQ ID NO: 1818 - RNA, 21 nt, Artificial Seqence
  siRNA antisense strand against b2GPI
cauucugguaauuuaguccaa

SEQ ID NO: 1819 - RNA, 21 nt, Artificial Seqence
  siRNA antisense strand against b2GPI
gcauucugguaauuuagucca

SEQ ID NO: 1820 - RNA, 21 nt, Artificial Seqence
  siRNA antisense strand against b2GPI
ugcauucugguaauuuagucc

SEQ ID NO: 1821 - RNA, 21 nt, Artificial Seqence
  siRNA antisense strand against b2GPI
cugcauucugguaauuuaguc

SEQ ID NO: 1822 - RNA, 21 nt, Artificial Seqence
  siRNA antisense strand against b2GPI
ccugcauucugguaauuuagu

SEQ ID NO: 1823 - RNA, 21 nt, Artificial Seqence
  siRNA antisense strand against b2GPI
cccugcauucugguaauuuag

SEQ ID NO: 1824 - RNA, 21 nt, Artificial Seqence
  siRNA antisense strand against b2GPI
ucccugcauucugguaauuua

SEQ ID NO: 1825 - RNA, 21 nt, Artificial Seqence
  siRNA antisense strand against b2GPI
uucccugcauucugguaauuu

SEQ ID NO: 1826 - RNA, 21 nt, Artificial Seqence
  siRNA antisense strand against b2GPI
cuucccugcauucugguaauu

SEQ ID NO: 1827 - RNA, 21 nt, Artificial Seqence
  siRNA antisense strand against b2GPI
acuucccugcauucugguaau

SEQ ID NO: 1828 - RNA, 21 nt, Artificial Seqence
  siRNA antisense strand against b2GPI
uacuucccugcauucugguaa

SEQ ID NO: 1829 - RNA, 21 nt, Artificial Seqence
  siRNA antisense strand against b2GPI
uuacuucccugcauucuggua

SEQ ID NO: 1830 - RNA, 21 nt, Artificial Seqence
  siRNA antisense strand against b2GPI
uuuacuucccugcauucuggu

SEQ ID NO: 1831 - RNA, 21 nt, Artificial Seqence
  siRNA antisense strand against b2GPI
uuuuacuucccugcauucugg

SEQ ID NO: 1832 - RNA, 21 nt, Artificial Seqence
  siRNA antisense strand against b2GPI
auuuuacuucccugcauucug

SEQ ID NO: 1833 - RNA, 21 nt, Artificial Seqence
  siRNA antisense strand against b2GPI
cauuuuacuucccugcauucu

SEQ ID NO: 1834 - RNA, 21 nt, Artificial Seqence
  siRNA antisense strand against b2GPI
gcauuuuacuucccugcauuc

SEQ ID NO: 1835 - RNA, 21 nt, Artificial Seqence
  siRNA antisense strand against b2GPI
ggcauuuuacuucccugcauu

SEQ ID NO: 1836 - RNA, 21 nt, Artificial Seqence
  siRNA antisense strand against b2GPI
gggcauuuuacuucccugcau

SEQ ID NO: 1837 - RNA, 21 nt, Artificial Seqence
  siRNA antisense strand against b2GPI
ugggcauuuuacuucccugca

SEQ ID NO: 1838 - RNA, 21 nt, Artificial Seqence
  siRNA antisense strand against b2GPI
augggcauuuuacuucccugc

SEQ ID NO: 1839 - RNA, 21 nt, Artificial Seqence
  siRNA antisense strand against b2GPI
aaugggcauuuuacuucccug

SEQ ID NO: 1840 - RNA, 21 nt, Artificial Seqence
  siRNA antisense strand against b2GPI
gaaugggcauuuuacuucccu

SEQ ID NO: 1841 - RNA, 21 nt, Artificial Seqence
  siRNA antisense strand against b2GPI
ggaaugggcauuuuacuuccc

SEQ ID NO: 1842 - RNA, 21 nt, Artificial Seqence
  siRNA antisense strand against b2GPI
gggaaugggcauuuuacuucc

SEQ ID NO: 1843 - RNA, 21 nt, Artificial Seqence
  siRNA antisense strand against b2GPI
ugggaaugggcauuuuacuuc

SEQ ID NO: 1844 - RNA, 21 nt, Artificial Seqence
  siRNA antisense strand against b2GPI
augggaaugggcauuuuacuu

SEQ ID NO: 1845 - RNA, 21 nt, Artificial Seqence
  siRNA antisense strand against b2GPI
gaugggaaugggcauuuuacu

SEQ ID NO: 1846 - RNA, 21 nt, Artificial Seqence
  siRNA antisense strand against b2GPI
ugaugggaaugggcauuuuac

SEQ ID NO: 1847 - RNA, 21 nt, Artificial Seqence
  siRNA antisense strand against b2GPI
uugaugggaaugggcauuuua

SEQ ID NO: 1848 - RNA, 21 nt, Artificial Seqence
  siRNA antisense strand against b2GPI
cuugaugggaaugggcauuuu

SEQ ID NO: 1849 - RNA, 21 nt, Artificial Seqence
  siRNA antisense strand against b2GPI
ucuugaugggaaugggcauuu

SEQ ID NO: 1850 - RNA, 21 nt, Artificial Seqence
  siRNA antisense strand against b2GPI
gucuugaugggaaugggcauu

SEQ ID NO: 1851 - RNA, 21 nt, Artificial Seqence
  siRNA antisense strand against b2GPI
ggucuugaugggaaugggcau

SEQ ID NO: 1852 - RNA, 21 nt, Artificial Seqence
  siRNA antisense strand against b2GPI
uggucuugaugggaaugggca

SEQ ID NO: 1853 - RNA, 21 nt, Artificial Seqence
  siRNA antisense strand against b2GPI
cuggucuugaugggaaugggc

SEQ ID NO: 1854 - RNA, 21 nt, Artificial Seqence
  siRNA antisense strand against b2GPI
ucuggucuugaugggaauggg

SEQ ID NO: 1855 - RNA, 21 nt, Artificial Seqence
  siRNA antisense strand against b2GPI
gucuggucuugaugggaaugg

SEQ ID NO: 1856 - RNA, 21 nt, Artificial Seqence
  siRNA antisense strand against b2GPI
ugucuggucuugaugggaaug

SEQ ID NO: 1857 - RNA, 21 nt, Artificial Seqence
  siRNA antisense strand against b2GPI
uugucuggucuugaugggaau

SEQ ID NO: 1858 - RNA, 21 nt, Artificial Seqence
  siRNA antisense strand against b2GPI
auugucuggucuugaugggaa

SEQ ID NO: 1859 - RNA, 21 nt, Artificial Seqence
  siRNA antisense strand against b2GPI
cauugucuggucuugauggga

SEQ ID NO: 1860 - RNA, 21 nt, Artificial Seqence
  siRNA antisense strand against b2GPI
ccauugucuggucuugauggg

SEQ ID NO: 1861 - RNA, 21 nt, Artificial Seqence
  siRNA antisense strand against b2GPI
uccauugucuggucuugaugg

SEQ ID NO: 1862 - RNA, 21 nt, Artificial Seqence
  siRNA antisense strand against b2GPI
auccauugucuggucuugaug

SEQ ID NO: 1863 - RNA, 21 nt, Artificial Seqence
  siRNA antisense strand against b2GPI
aauccauugucuggucuugau

SEQ ID NO: 1864 - RNA, 21 nt, Artificial Seqence
  siRNA antisense strand against b2GPI
aaauccauugucuggucuuga

SEQ ID NO: 1865 - RNA, 21 nt, Artificial Seqence
  siRNA antisense strand against b2GPI
caaauccauugucuggucuug

SEQ ID NO: 1866 - RNA, 21 nt, Artificial Seqence
  siRNA antisense strand against b2GPI
acaaauccauugucuggucuu

SEQ ID NO: 1867 - RNA, 21 nt, Artificial Seqence
  siRNA antisense strand against b2GPI
cacaaauccauugucuggucu

SEQ ID NO: 1868 - RNA, 21 nt, Artificial Seqence
  siRNA antisense strand against b2GPI
ucacaaauccauugucugguc

SEQ ID NO: 1869 - RNA, 21 nt, Artificial Seqence
  siRNA antisense strand against b2GPI
uucacaaauccauugucuggu

SEQ ID NO: 1870 - RNA, 21 nt, Artificial Seqence
  siRNA antisense strand against b2GPI
guucacaaauccauugucugg

SEQ ID NO: 1871 - RNA, 21 nt, Artificial Seqence
  siRNA antisense strand against b2GPI
aguucacaaauccauugucug

SEQ ID NO: 1872 - RNA, 21 nt, Artificial Seqence
  siRNA antisense strand against b2GPI
uaguucacaaauccauugucu

SEQ ID NO: 1873 - RNA, 21 nt, Artificial Seqence
  siRNA antisense strand against b2GPI
auaguucacaaauccauuguc

SEQ ID NO: 1874 - RNA, 21 nt, Artificial Seqence
  siRNA antisense strand against b2GPI
gauaguucacaaauccauugu

SEQ ID NO: 1875 - RNA, 21 nt, Artificial Seqence
  siRNA antisense strand against b2GPI
ggauaguucacaaauccauug

SEQ ID NO: 1876 - RNA, 21 nt, Artificial Seqence
  siRNA antisense strand against b2GPI
aggauaguucacaaauccauu

SEQ ID NO: 1877 - RNA, 21 nt, Artificial Seqence
  siRNA antisense strand against b2GPI
caggauaguucacaaauccau

SEQ ID NO: 1878 - RNA, 21 nt, Artificial Seqence
  siRNA antisense strand against b2GPI
gcaggauaguucacaaaucca

SEQ ID NO: 1879 - RNA, 21 nt, Artificial Seqence
  siRNA antisense strand against b2GPI
ugcaggauaguucacaaaucc

SEQ ID NO: 1880 - RNA, 21 nt, Artificial Seqence
  siRNA antisense strand against b2GPI
uugcaggauaguucacaaauc

SEQ ID NO: 1881 - RNA, 21 nt, Artificial Seqence
  siRNA antisense strand against b2GPI
uuugcaggauaguucacaaau

SEQ ID NO: 1882 - RNA, 21 nt, Artificial Seqence
  siRNA antisense strand against b2GPI
uuuugcaggauaguucacaaa

SEQ ID NO: 1883 - RNA, 21 nt, Artificial Seqence
  siRNA antisense strand against b2GPI
guuuugcaggauaguucacaa

SEQ ID NO: 1884 - RNA, 21 nt, Artificial Seqence
  siRNA antisense strand against b2GPI
gguuuugcaggauaguucaca

SEQ ID NO: 1885 - RNA, 21 nt, Artificial Seqence
  siRNA antisense strand against b2GPI
ugguuuugcaggauaguucac

SEQ ID NO: 1886 - RNA, 21 nt, Artificial Seqence
  siRNA antisense strand against b2GPI
uugguuuugcaggauaguuca

SEQ ID NO: 1887 - RNA, 21 nt, Artificial Seqence
  siRNA antisense strand against b2GPI
guugguuuugcaggauaguuc

SEQ ID NO: 1888 - RNA, 21 nt, Artificial Seqence
  siRNA antisense strand against b2GPI
uguugguuuugcaggauaguu

SEQ ID NO: 1889 - RNA, 21 nt, Artificial Seqence
  siRNA antisense strand against b2GPI
guguugguuuugcaggauagu

SEQ ID NO: 1890 - RNA, 21 nt, Artificial Seqence
  siRNA antisense strand against b2GPI
aguguugguuuugcaggauag

SEQ ID NO: 1891 - RNA, 21 nt, Artificial Seqence
  siRNA antisense strand against b2GPI
aaguguugguuuugcaggaua

SEQ ID NO: 1892 - RNA, 21 nt, Artificial Seqence
  siRNA antisense strand against b2GPI
aaaguguugguuuugcaggau

SEQ ID NO: 1893 - RNA, 21 nt, Artificial Seqence
  siRNA antisense strand against b2GPI
uaaaguguugguuuugcagga

SEQ ID NO: 1894 - RNA, 21 nt, Artificial Seqence
  siRNA antisense strand against b2GPI
auaaaguguugguuuugcagg

SEQ ID NO: 1895 - RNA, 21 nt, Artificial Seqence
  siRNA antisense strand against b2GPI
aauaaaguguugguuuugcag

SEQ ID NO: 1896 - RNA, 21 nt, Artificial Seqence
  siRNA antisense strand against b2GPI
uaauaaaguguugguuuugca

SEQ ID NO: 1897 - RNA, 21 nt, Artificial Seqence
  siRNA antisense strand against b2GPI
guaauaaaguguugguuuugc

SEQ ID NO: 1898 - RNA, 21 nt, Artificial Seqence
  siRNA antisense strand against b2GPI
uguaauaaaguguugguuuug

SEQ ID NO: 1899 - RNA, 21 nt, Artificial Seqence
  siRNA antisense strand against b2GPI
uuguaauaaaguguugguuuu

SEQ ID NO: 1900 - RNA, 21 nt, Artificial Seqence
  siRNA antisense strand against b2GPI
cuuguaauaaaguguugguuu

SEQ ID NO: 1901 - RNA, 21 nt, Artificial Seqence
  siRNA antisense strand against b2GPI
ccuuguaauaaaguguugguu

SEQ ID NO: 1902 - RNA, 21 nt, Artificial Seqence
  siRNA antisense strand against b2GPI
uccuuguaauaaaguguuggu

SEQ ID NO: 1903 - RNA, 21 nt, Artificial Seqence
  siRNA antisense strand against b2GPI
auccuuguaauaaaguguugg

SEQ ID NO: 1904 - RNA, 21 nt, Artificial Seqence
  siRNA antisense strand against b2GPI
uauccuuguaauaaaguguug

SEQ ID NO: 1905 - RNA, 21 nt, Artificial Seqence
  siRNA antisense strand against b2GPI
uuauccuuguaauaaaguguu

SEQ ID NO: 1906 - RNA, 21 nt, Artificial Seqence
  siRNA antisense strand against b2GPI
uuuauccuuguaauaaagugu

SEQ ID NO: 1907 - RNA, 21 nt, Artificial Seqence
  siRNA antisense strand against b2GPI
cuuuauccuuguaauaaagug

SEQ ID NO: 1908 - RNA, 21 nt, Artificial Seqence
  siRNA antisense strand against b2GPI
gcuuuauccuuguaauaaagu

SEQ ID NO: 1909 - RNA, 21 nt, Artificial Seqence
  siRNA antisense strand against b2GPI
ggcuuuauccuuguaauaaag

SEQ ID NO: 1910 - RNA, 21 nt, Artificial Seqence
  siRNA antisense strand against b2GPI
uggcuuuauccuuguaauaaa

SEQ ID NO: 1911 - RNA, 21 nt, Artificial Seqence
  siRNA antisense strand against b2GPI
guggcuuuauccuuguaauaa

SEQ ID NO: 1912 - RNA, 21 nt, Artificial Seqence
  siRNA antisense strand against b2GPI
uguggcuuuauccuuguaaua

SEQ ID NO: 1913 - RNA, 21 nt, Artificial Seqence
  siRNA antisense strand against b2GPI
auguggcuuuauccuuguaau

SEQ ID NO: 1914 - RNA, 21 nt, Artificial Seqence
  siRNA antisense strand against b2GPI
aauguggcuuuauccuuguaa

SEQ ID NO: 1915 - RNA, 21 nt, Artificial Seqence
  siRNA antisense strand against b2GPI
aaauguggcuuuauccuugua

SEQ ID NO: 1916 - RNA, 21 nt, Artificial Seqence
  siRNA antisense strand against b2GPI
caaauguggcuuuauccuugu

SEQ ID NO: 1917 - RNA, 21 nt, Artificial Seqence
  siRNA antisense strand against b2GPI
ccaaauguggcuuuauccuug

SEQ ID NO: 1918 - RNA, 21 nt, Artificial Seqence
  siRNA antisense strand against b2GPI
gccaaauguggcuuuauccuu

SEQ ID NO: 1919 - RNA, 21 nt, Artificial Seqence
  siRNA antisense strand against b2GPI
agccaaauguggcuuuauccu

SEQ ID NO: 1920 - RNA, 21 nt, Artificial Seqence
  siRNA antisense strand against b2GPI
cagccaaauguggcuuuaucc

SEQ ID NO: 1921 - RNA, 21 nt, Artificial Seqence
  siRNA antisense strand against b2GPI
gcagccaaauguggcuuuauc

SEQ ID NO: 1922 - RNA, 21 nt, Artificial Seqence
  siRNA antisense strand against b2GPI
ggcagccaaauguggcuuuau

SEQ ID NO: 1923 - RNA, 21 nt, Artificial Seqence
  siRNA antisense strand against b2GPI
uggcagccaaauguggcuuua

SEQ ID NO: 1924 - RNA, 21 nt, Artificial Seqence
  siRNA antisense strand against b2GPI
auggcagccaaauguggcuuu

SEQ ID NO: 1925 - RNA, 21 nt, Artificial Seqence
  siRNA antisense strand against b2GPI
cauggcagccaaauguggcuu

SEQ ID NO: 1926 - RNA, 21 nt, Artificial Seqence
  siRNA antisense strand against b2GPI
ucauggcagccaaauguggcu

SEQ ID NO: 1927 - RNA, 21 nt, Artificial Seqence
  siRNA antisense strand against b2GPI
aucauggcagccaaauguggc

SEQ ID NO: 1928 - RNA, 21 nt, Artificial Seqence
  siRNA antisense strand against b2GPI
caucauggcagccaaaugugg

SEQ ID NO: 1929 - RNA, 21 nt, Artificial Seqence
  siRNA antisense strand against b2GPI
ccaucauggcagccaaaugug

SEQ ID NO: 1930 - RNA, 21 nt, Artificial Seqence
  siRNA antisense strand against b2GPI
uccaucauggcagccaaaugu

SEQ ID NO: 1931 - RNA, 21 nt, Artificial Seqence
  siRNA antisense strand against b2GPI
auccaucauggcagccaaaug

SEQ ID NO: 1932 - RNA, 21 nt, Artificial Seqence
  siRNA antisense strand against b2GPI
uauccaucauggcagccaaau

SEQ ID NO: 1933 - RNA, 21 nt, Artificial Seqence
  siRNA antisense strand against b2GPI
auauccaucauggcagccaaa

SEQ ID NO: 1934 - RNA, 21 nt, Artificial Seqence
  siRNA antisense strand against b2GPI
aauauccaucauggcagccaa

SEQ ID NO: 1935 - RNA, 21 nt, Artificial Seqence
  siRNA antisense strand against b2GPI
gaauauccaucauggcagcca

SEQ ID NO: 1936 - RNA, 21 nt, Artificial Seqence
  siRNA antisense strand against b2GPI
agaauauccaucauggcagcc

SEQ ID NO: 1937 - RNA, 21 nt, Artificial Seqence
  siRNA antisense strand against b2GPI
gagaauauccaucauggcagc

SEQ ID NO: 1938 - RNA, 21 nt, Artificial Seqence
  siRNA antisense strand against b2GPI
agagaauauccaucauggcag

SEQ ID NO: 1939 - RNA, 21 nt, Artificial Seqence
  siRNA antisense strand against b2GPI
cagagaauauccaucauggca

SEQ ID NO: 1940 - RNA, 21 nt, Artificial Seqence
  siRNA antisense strand against b2GPI
ccagagaauauccaucauggc

SEQ ID NO: 1941 - RNA, 21 nt, Artificial Seqence
  siRNA antisense strand against b2GPI
uccagagaauauccaucaugg

SEQ ID NO: 1942 - RNA, 21 nt, Artificial Seqence
  siRNA antisense strand against b2GPI
auccagagaauauccaucaug

SEQ ID NO: 1943 - RNA, 21 nt, Artificial Seqence
  siRNA antisense strand against b2GPI
cauccagagaauauccaucau

SEQ ID NO: 1944 - RNA, 21 nt, Artificial Seqence
  siRNA antisense strand against b2GPI
ccauccagagaauauccauca

SEQ ID NO: 1945 - RNA, 21 nt, Artificial Seqence
  siRNA antisense strand against b2GPI
gccauccagagaauauccauc

SEQ ID NO: 1946 - RNA, 21 nt, Artificial Seqence
  siRNA antisense strand against b2GPI
ggccauccagagaauauccau

SEQ ID NO: 1947 - RNA, 21 nt, Artificial Seqence
  siRNA antisense strand against b2GPI
gggccauccagagaauaucca

SEQ ID NO: 1948 - RNA, 21 nt, Artificial Seqence
  siRNA antisense strand against b2GPI
cgggccauccagagaauaucc

SEQ ID NO: 1949 - RNA, 21 nt, Artificial Seqence
  siRNA antisense strand against b2GPI
ccgggccauccagagaauauc

SEQ ID NO: 1950 - RNA, 21 nt, Artificial Seqence
  siRNA antisense strand against b2GPI
uccgggccauccagagaauau

SEQ ID NO: 1951 - RNA, 21 nt, Artificial Seqence
  siRNA antisense strand against b2GPI
uuccgggccauccagagaaua

SEQ ID NO: 1952 - RNA, 21 nt, Artificial Seqence
  siRNA antisense strand against b2GPI
cuuccgggccauccagagaau

SEQ ID NO: 1953 - RNA, 21 nt, Artificial Seqence
  siRNA antisense strand against b2GPI
ucuuccgggccauccagagaa

SEQ ID NO: 1954 - RNA, 21 nt, Artificial Seqence
  siRNA antisense strand against b2GPI
uucuuccgggccauccagaga

SEQ ID NO: 1955 - RNA, 21 nt, Artificial Seqence
  siRNA antisense strand against b2GPI
uuucuuccgggccauccagag

SEQ ID NO: 1956 - RNA, 21 nt, Artificial Seqence
  siRNA antisense strand against b2GPI
auuucuuccgggccauccaga

SEQ ID NO: 1957 - RNA, 21 nt, Artificial Seqence
  siRNA antisense strand against b2GPI
uauuucuuccgggccauccag

SEQ ID NO: 1958 - RNA, 21 nt, Artificial Seqence
  siRNA antisense strand against b2GPI
cuauuucuuccgggccaucca

SEQ ID NO: 1959 - RNA, 21 nt, Artificial Seqence
  siRNA antisense strand against b2GPI
ucuauuucuuccgggccaucc

SEQ ID NO: 1960 - RNA, 21 nt, Artificial Seqence
  siRNA antisense strand against b2GPI
uucuauuucuuccgggccauc

SEQ ID NO: 1961 - RNA, 21 nt, Artificial Seqence
  siRNA antisense strand against b2GPI
auucuauuucuuccgggccau

SEQ ID NO: 1962 - RNA, 21 nt, Artificial Seqence
  siRNA antisense strand against b2GPI
cauucuauuucuuccgggcca

SEQ ID NO: 1963 - RNA, 21 nt, Artificial Seqence
  siRNA antisense strand against b2GPI
acauucuauuucuuccgggcc

SEQ ID NO: 1964 - RNA, 21 nt, Artificial Seqence
  siRNA antisense strand against b2GPI
uacauucuauuucuuccgggc

SEQ ID NO: 1965 - RNA, 21 nt, Artificial Seqence
  siRNA antisense strand against b2GPI
guacauucuauuucuuccggg

SEQ ID NO: 1966 - RNA, 21 nt, Artificial Seqence
  siRNA antisense strand against b2GPI
gguacauucuauuucuuccgg

SEQ ID NO: 1967 - RNA, 21 nt, Artificial Seqence
  siRNA antisense strand against b2GPI
ugguacauucuauuucuuccg

SEQ ID NO: 1968 - RNA, 21 nt, Artificial Seqence
  siRNA antisense strand against b2GPI
uugguacauucuauuucuucc

SEQ ID NO: 1969 - RNA, 21 nt, Artificial Seqence
  siRNA antisense strand against b2GPI
uuugguacauucuauuucuuc

SEQ ID NO: 1970 - RNA, 21 nt, Artificial Seqence
  siRNA antisense strand against b2GPI
guuugguacauucuauuucuu

SEQ ID NO: 1971 - RNA, 21 nt, Artificial Seqence
  siRNA antisense strand against b2GPI
aguuugguacauucuauuucu

SEQ ID NO: 1972 - RNA, 21 nt, Artificial Seqence
  siRNA antisense strand against b2GPI
caguuugguacauucuauuuc

SEQ ID NO: 1973 - RNA, 21 nt, Artificial Seqence
  siRNA antisense strand against b2GPI
ccaguuugguacauucuauuu

SEQ ID NO: 1974 - RNA, 21 nt, Artificial Seqence
  siRNA antisense strand against b2GPI
cccaguuugguacauucuauu

SEQ ID NO: 1975 - RNA, 21 nt, Artificial Seqence
  siRNA antisense strand against b2GPI
ucccaguuugguacauucuau

SEQ ID NO: 1976 - RNA, 21 nt, Artificial Seqence
  siRNA antisense strand against b2GPI
uucccaguuugguacauucua

SEQ ID NO: 1977 - RNA, 21 nt, Artificial Seqence
  siRNA antisense strand against b2GPI
uuucccaguuugguacauucu

SEQ ID NO: 1978 - RNA, 21 nt, Artificial Seqence
  siRNA antisense strand against b2GPI
guuucccaguuugguacauuc

SEQ ID NO: 1979 - RNA, 21 nt, Artificial Seqence
  siRNA antisense strand against b2GPI
aguuucccaguuugguacauu

SEQ ID NO: 1980 - RNA, 21 nt, Artificial Seqence
  siRNA antisense strand against b2GPI
caguuucccaguuugguacau

SEQ ID NO: 1981 - RNA, 21 nt, Artificial Seqence
  siRNA antisense strand against b2GPI
ccaguuucccaguuugguaca

SEQ ID NO: 1982 - RNA, 21 nt, Artificial Seqence
  siRNA antisense strand against b2GPI
accaguuucccaguuugguac

SEQ ID NO: 1983 - RNA, 21 nt, Artificial Seqence
  siRNA antisense strand against b2GPI
gaccaguuucccaguuuggua

SEQ ID NO: 1984 - RNA, 21 nt, Artificial Seqence
  siRNA antisense strand against b2GPI
agaccaguuucccaguuuggu

SEQ ID NO: 1985 - RNA, 21 nt, Artificial Seqence
  siRNA antisense strand against b2GPI
cagaccaguuucccaguuugg

SEQ ID NO: 1986 - RNA, 21 nt, Artificial Seqence
  siRNA antisense strand against b2GPI
gcagaccaguuucccaguuug

SEQ ID NO: 1987 - RNA, 21 nt, Artificial Seqence
  siRNA antisense strand against b2GPI
ggcagaccaguuucccaguuu

SEQ ID NO: 1988 - RNA, 21 nt, Artificial Seqence
  siRNA antisense strand against b2GPI
uggcagaccaguuucccaguu

SEQ ID NO: 1989 - RNA, 21 nt, Artificial Seqence
  siRNA antisense strand against b2GPI
auggcagaccaguuucccagu

SEQ ID NO: 1990 - RNA, 21 nt, Artificial Seqence
  siRNA antisense strand against b2GPI
cauggcagaccaguuucccag

SEQ ID NO: 1991 - RNA, 21 nt, Artificial Seqence
  siRNA antisense strand against b2GPI
gcauggcagaccaguuuccca

SEQ ID NO: 1992 - RNA, 21 nt, Artificial Seqence
  siRNA antisense strand against b2GPI
ggcauggcagaccaguuuccc

SEQ ID NO: 1993 - RNA, 21 nt, Artificial Seqence
  siRNA antisense strand against b2GPI
uggcauggcagaccaguuucc

SEQ ID NO: 1994 - RNA, 21 nt, Artificial Seqence
  siRNA antisense strand against b2GPI
uuggcauggcagaccaguuuc

SEQ ID NO: 1995 - RNA, 21 nt, Artificial Seqence
  siRNA antisense strand against b2GPI
cuuggcauggcagaccaguuu

SEQ ID NO: 1996 - RNA, 21 nt, Artificial Seqence
  siRNA antisense strand against b2GPI
acuuggcauggcagaccaguu

SEQ ID NO: 1997 - RNA, 21 nt, Artificial Seqence
  siRNA antisense strand against b2GPI
aacuuggcauggcagaccagu

SEQ ID NO: 1998 - RNA, 21 nt, Artificial Seqence
  siRNA antisense strand against b2GPI
caacuuggcauggcagaccag

SEQ ID NO: 1999 - RNA, 21 nt, Artificial Seqence
  siRNA antisense strand against b2GPI
acaacuuggcauggcagacca

SEQ ID NO: 2000 - RNA, 21 nt, Artificial Seqence
  siRNA antisense strand against b2GPI
uacaacuuggcauggcagacc

SEQ ID NO: 2001 - RNA, 21 nt, Artificial Seqence
  siRNA antisense strand against b2GPI
uuacaacuuggcauggcagac

SEQ ID NO: 2002 - RNA, 21 nt, Artificial Seqence
  siRNA antisense strand against b2GPI
uuuacaacuuggcauggcaga

SEQ ID NO: 2003 - RNA, 21 nt, Artificial Seqence
  siRNA antisense strand against b2GPI
cuuuacaacuuggcauggcag

SEQ ID NO: 2004 - RNA, 21 nt, Artificial Seqence
  siRNA antisense strand against b2GPI
gcuuuacaacuuggcauggca

SEQ ID NO: 2005 - RNA, 21 nt, Artificial Seqence
  siRNA antisense strand against b2GPI
ugcuuuacaacuuggcauggc

SEQ ID NO: 2006 - RNA, 21 nt, Artificial Seqence
  siRNA antisense strand against b2GPI
augcuuuacaacuuggcaugg

SEQ ID NO: 2007 - RNA, 21 nt, Artificial Seqence
  siRNA antisense strand against b2GPI
gaugcuuuacaacuuggcaug

SEQ ID NO: 2008 - RNA, 21 nt, Artificial Seqence
  siRNA antisense strand against b2GPI
agaugcuuuacaacuuggcau

SEQ ID NO: 2009 - RNA, 21 nt, Artificial Seqence
  siRNA antisense strand against b2GPI
aagaugcuuuacaacuuggca

SEQ ID NO: 2010 - RNA, 21 nt, Artificial Seqence
  siRNA antisense strand against b2GPI
caagaugcuuuacaacuuggc

SEQ ID NO: 2011 - RNA, 21 nt, Artificial Seqence
  siRNA antisense strand against b2GPI
acaagaugcuuuacaacuugg

SEQ ID NO: 2012 - RNA, 21 nt, Artificial Seqence
  siRNA antisense strand against b2GPI
uacaagaugcuuuacaacuug

SEQ ID NO: 2013 - RNA, 21 nt, Artificial Seqence
  siRNA antisense strand against b2GPI
uuacaagaugcuuuacaacuu

SEQ ID NO: 2014 - RNA, 21 nt, Artificial Seqence
  siRNA antisense strand against b2GPI
uuuacaagaugcuuuacaacu

SEQ ID NO: 2015 - RNA, 21 nt, Artificial Seqence
  siRNA antisense strand against b2GPI
cuuuacaagaugcuuuacaac

SEQ ID NO: 2016 - RNA, 21 nt, Artificial Seqence
  siRNA antisense strand against b2GPI
acuuuacaagaugcuuuacaa

SEQ ID NO: 2017 - RNA, 21 nt, Artificial Seqence
  siRNA antisense strand against b2GPI
uacuuuacaagaugcuuuaca

SEQ ID NO: 2018 - RNA, 21 nt, Artificial Seqence
  siRNA antisense strand against b2GPI
guacuuuacaagaugcuuuac

SEQ ID NO: 2019 - RNA, 21 nt, Artificial Seqence
  siRNA antisense strand against b2GPI
gguacuuuacaagaugcuuua

SEQ ID NO: 2020 - RNA, 21 nt, Artificial Seqence
  siRNA antisense strand against b2GPI
agguacuuuacaagaugcuuu

SEQ ID NO: 2021 - RNA, 21 nt, Artificial Seqence
  siRNA antisense strand against b2GPI
cagguacuuuacaagaugcuu

SEQ ID NO: 2022 - RNA, 21 nt, Artificial Seqence
  siRNA antisense strand against b2GPI
acagguacuuuacaagaugcu

SEQ ID NO: 2023 - RNA, 21 nt, Artificial Seqence
  siRNA antisense strand against b2GPI
cacagguacuuuacaagaugc

SEQ ID NO: 2024 - RNA, 21 nt, Artificial Seqence
  siRNA antisense strand against b2GPI
ucacagguacuuuacaagaug

SEQ ID NO: 2025 - RNA, 21 nt, Artificial Seqence
  siRNA antisense strand against b2GPI
uucacagguacuuuacaagau

SEQ ID NO: 2026 - RNA, 21 nt, Artificial Seqence
  siRNA antisense strand against b2GPI
uuucacagguacuuuacaaga

SEQ ID NO: 2027 - RNA, 21 nt, Artificial Seqence
  siRNA antisense strand against b2GPI
uuuucacagguacuuuacaag

SEQ ID NO: 2028 - RNA, 21 nt, Artificial Seqence
  siRNA antisense strand against b2GPI
uuuuucacagguacuuuacaa

SEQ ID NO: 2029 - RNA, 21 nt, Artificial Seqence
  siRNA antisense strand against b2GPI
uuuuuucacagguacuuuaca

SEQ ID NO: 2030 - RNA, 21 nt, Artificial Seqence
  siRNA antisense strand against b2GPI
cuuuuuucacagguacuuuac

SEQ ID NO: 2031 - RNA, 21 nt, Artificial Seqence
  siRNA antisense strand against b2GPI
gcuuuuuucacagguacuuua

SEQ ID NO: 2032 - RNA, 21 nt, Artificial Seqence
  siRNA antisense strand against b2GPI
ggcuuuuuucacagguacuuu

SEQ ID NO: 2033 - RNA, 21 nt, Artificial Seqence
  siRNA antisense strand against b2GPI
uggcuuuuuucacagguacuu

SEQ ID NO: 2034 - RNA, 21 nt, Artificial Seqence
  siRNA antisense strand against b2GPI
guggcuuuuuucacagguacu

SEQ ID NO: 2035 - RNA, 21 nt, Artificial Seqence
  siRNA antisense strand against b2GPI
aguggcuuuuuucacagguac

SEQ ID NO: 2036 - RNA, 21 nt, Artificial Seqence
  siRNA antisense strand against b2GPI
caguggcuuuuuucacaggua

SEQ ID NO: 2037 - RNA, 21 nt, Artificial Seqence
  siRNA antisense strand against b2GPI
acaguggcuuuuuucacaggu

SEQ ID NO: 2038 - RNA, 21 nt, Artificial Seqence
  siRNA antisense strand against b2GPI
cacaguggcuuuuuucacagg

SEQ ID NO: 2039 - RNA, 21 nt, Artificial Seqence
  siRNA antisense strand against b2GPI
ccacaguggcuuuuuucacag

SEQ ID NO: 2040 - RNA, 21 nt, Artificial Seqence
  siRNA antisense strand against b2GPI
accacaguggcuuuuuucaca

SEQ ID NO: 2041 - RNA, 21 nt, Artificial Seqence
  siRNA antisense strand against b2GPI
caccacaguggcuuuuuucac

SEQ ID NO: 2042 - RNA, 21 nt, Artificial Seqence
  siRNA antisense strand against b2GPI
acaccacaguggcuuuuuuca

SEQ ID NO: 2043 - RNA, 21 nt, Artificial Seqence
  siRNA antisense strand against b2GPI
uacaccacaguggcuuuuuuc

SEQ ID NO: 2044 - RNA, 21 nt, Artificial Seqence
  siRNA antisense strand against b2GPI
guacaccacaguggcuuuuuu

SEQ ID NO: 2045 - RNA, 21 nt, Artificial Seqence
  siRNA antisense strand against b2GPI
gguacaccacaguggcuuuuu

SEQ ID NO: 2046 - RNA, 21 nt, Artificial Seqence
  siRNA antisense strand against b2GPI
ugguacaccacaguggcuuuu

SEQ ID NO: 2047 - RNA, 21 nt, Artificial Seqence
  siRNA antisense strand against b2GPI
uugguacaccacaguggcuuu

SEQ ID NO: 2048 - RNA, 21 nt, Artificial Seqence
  siRNA antisense strand against b2GPI
cuugguacaccacaguggcuu

SEQ ID NO: 2049 - RNA, 21 nt, Artificial Seqence
  siRNA antisense strand against b2GPI
ccuugguacaccacaguggcu

SEQ ID NO: 2050 - RNA, 21 nt, Artificial Seqence
  siRNA antisense strand against b2GPI
uccuugguacaccacaguggc

SEQ ID NO: 2051 - RNA, 21 nt, Artificial Seqence
  siRNA antisense strand against b2GPI
cuccuugguacaccacagugg

SEQ ID NO: 2052 - RNA, 21 nt, Artificial Seqence
  siRNA antisense strand against b2GPI
ucuccuugguacaccacagug

SEQ ID NO: 2053 - RNA, 21 nt, Artificial Seqence
  siRNA antisense strand against b2GPI
cucuccuugguacaccacagu

SEQ ID NO: 2054 - RNA, 21 nt, Artificial Seqence
  siRNA antisense strand against b2GPI
ucucuccuugguacaccacag

SEQ ID NO: 2055 - RNA, 21 nt, Artificial Seqence
  siRNA antisense strand against b2GPI
cucucuccuugguacaccaca

SEQ ID NO: 2056 - RNA, 21 nt, Artificial Seqence
  siRNA antisense strand against b2GPI
ucucucuccuugguacaccac

SEQ ID NO: 2057 - RNA, 21 nt, Artificial Seqence
  siRNA antisense strand against b2GPI
cucucucuccuugguacacca

SEQ ID NO: 2058 - RNA, 21 nt, Artificial Seqence
  siRNA antisense strand against b2GPI
acucucucuccuugguacacc

SEQ ID NO: 2059 - RNA, 21 nt, Artificial Seqence
  siRNA antisense strand against b2GPI
uacucucucuccuugguacac

SEQ ID NO: 2060 - RNA, 21 nt, Artificial Seqence
  siRNA antisense strand against b2GPI
uuacucucucuccuugguaca

SEQ ID NO: 2061 - RNA, 21 nt, Artificial Seqence
  siRNA antisense strand against b2GPI
uuuacucucucuccuugguac

SEQ ID NO: 2062 - RNA, 21 nt, Artificial Seqence
  siRNA antisense strand against b2GPI
cuuuacucucucuccuuggua

SEQ ID NO: 2063 - RNA, 21 nt, Artificial Seqence
  siRNA antisense strand against b2GPI
ucuuuacucucucuccuuggu

SEQ ID NO: 2064 - RNA, 21 nt, Artificial Seqence
  siRNA antisense strand against b2GPI
aucuuuacucucucuccuugg

SEQ ID NO: 2065 - RNA, 21 nt, Artificial Seqence
  siRNA antisense strand against b2GPI
aaucuuuacucucucuccuug

SEQ ID NO: 2066 - RNA, 21 nt, Artificial Seqence
  siRNA antisense strand against b2GPI
gaaucuuuacucucucuccuu

SEQ ID NO: 2067 - RNA, 21 nt, Artificial Seqence
  siRNA antisense strand against b2GPI
ugaaucuuuacucucucuccu

SEQ ID NO: 2068 - RNA, 21 nt, Artificial Seqence
  siRNA antisense strand against b2GPI
cugaaucuuuacucucucucc

SEQ ID NO: 2069 - RNA, 21 nt, Artificial Seqence
  siRNA antisense strand against b2GPI
ccugaaucuuuacucucucuc

SEQ ID NO: 2070 - RNA, 21 nt, Artificial Seqence
  siRNA antisense strand against b2GPI
uccugaaucuuuacucucucu

SEQ ID NO: 2071 - RNA, 21 nt, Artificial Seqence
  siRNA antisense strand against b2GPI
uuccugaaucuuuacucucuc

SEQ ID NO: 2072 - RNA, 21 nt, Artificial Seqence
  siRNA antisense strand against b2GPI
uuuccugaaucuuuacucucu

SEQ ID NO: 2073 - RNA, 21 nt, Artificial Seqence
  siRNA antisense strand against b2GPI
uuuuccugaaucuuuacucuc

SEQ ID NO: 2074 - RNA, 21 nt, Artificial Seqence
  siRNA antisense strand against b2GPI
uuuuuccugaaucuuuacucu

SEQ ID NO: 2075 - RNA, 21 nt, Artificial Seqence
  siRNA antisense strand against b2GPI
auuuuuccugaaucuuuacuc

SEQ ID NO: 2076 - RNA, 21 nt, Artificial Seqence
  siRNA antisense strand against b2GPI
aauuuuuccugaaucuuuacu

SEQ ID NO: 2077 - RNA, 21 nt, Artificial Seqence
  siRNA antisense strand against b2GPI
aaauuuuuccugaaucuuuac

SEQ ID NO: 2078 - RNA, 21 nt, Artificial Seqence
  siRNA antisense strand against b2GPI
uaaauuuuuccugaaucuuua

SEQ ID NO: 2079 - RNA, 21 nt, Artificial Seqence
  siRNA antisense strand against b2GPI
uuaaauuuuuccugaaucuuu

SEQ ID NO: 2080 - RNA, 21 nt, Artificial Seqence
  siRNA antisense strand against b2GPI
cuuaaauuuuuccugaaucuu

SEQ ID NO: 2081 - RNA, 21 nt, Artificial Seqence
  siRNA antisense strand against b2GPI
ucuuaaauuuuuccugaaucu

SEQ ID NO: 2082 - RNA, 21 nt, Artificial Seqence
  siRNA antisense strand against b2GPI
uucuuaaauuuuuccugaauc

SEQ ID NO: 2083 - RNA, 21 nt, Artificial Seqence
  siRNA antisense strand against b2GPI
auucuuaaauuuuuccugaau

SEQ ID NO: 2084 - RNA, 21 nt, Artificial Seqence
  siRNA antisense strand against b2GPI
cauucuuaaauuuuuccugaa

SEQ ID NO: 2085 - RNA, 21 nt, Artificial Seqence
  siRNA antisense strand against b2GPI
ccauucuuaaauuuuuccuga

SEQ ID NO: 2086 - RNA, 21 nt, Artificial Seqence
  siRNA antisense strand against b2GPI
uccauucuuaaauuuuuccug

SEQ ID NO: 2087 - RNA, 21 nt, Artificial Seqence
  siRNA antisense strand against b2GPI
uuccauucuuaaauuuuuccu

SEQ ID NO: 2088 - RNA, 21 nt, Artificial Seqence
  siRNA antisense strand against b2GPI
auuccauucuuaaauuuuucc

SEQ ID NO: 2089 - RNA, 21 nt, Artificial Seqence
  siRNA antisense strand against b2GPI
cauuccauucuuaaauuuuuc

SEQ ID NO: 2090 - RNA, 21 nt, Artificial Seqence
  siRNA antisense strand against b2GPI
gcauuccauucuuaaauuuuu

SEQ ID NO: 2091 - RNA, 21 nt, Artificial Seqence
  siRNA antisense strand against b2GPI
agcauuccauucuuaaauuuu

SEQ ID NO: 2092 - RNA, 21 nt, Artificial Seqence
  siRNA antisense strand against b2GPI
uagcauuccauucuuaaauuu

SEQ ID NO: 2093 - RNA, 21 nt, Artificial Seqence
  siRNA antisense strand against b2GPI
guagcauuccauucuuaaauu

SEQ ID NO: 2094 - RNA, 21 nt, Artificial Seqence
  siRNA antisense strand against b2GPI
uguagcauuccauucuuaaau

SEQ ID NO: 2095 - RNA, 21 nt, Artificial Seqence
  siRNA antisense strand against b2GPI
auguagcauuccauucuuaaa

SEQ ID NO: 2096 - RNA, 21 nt, Artificial Seqence
  siRNA antisense strand against b2GPI
cauguagcauuccauucuuaa

SEQ ID NO: 2097 - RNA, 21 nt, Artificial Seqence
  siRNA antisense strand against b2GPI
ccauguagcauuccauucuua

SEQ ID NO: 2098 - RNA, 21 nt, Artificial Seqence
  siRNA antisense strand against b2GPI
accauguagcauuccauucuu

SEQ ID NO: 2099 - RNA, 21 nt, Artificial Seqence
  siRNA antisense strand against b2GPI
caccauguagcauuccauucu

SEQ ID NO: 2100 - RNA, 21 nt, Artificial Seqence
  siRNA antisense strand against b2GPI
ucaccauguagcauuccauuc

SEQ ID NO: 2101 - RNA, 21 nt, Artificial Seqence
  siRNA antisense strand against b2GPI
aucaccauguagcauuccauu

SEQ ID NO: 2102 - RNA, 21 nt, Artificial Seqence
  siRNA antisense strand against b2GPI
uaucaccauguagcauuccau

SEQ ID NO: 2103 - RNA, 21 nt, Artificial Seqence
  siRNA antisense strand against b2GPI
uuaucaccauguagcauucca

SEQ ID NO: 2104 - RNA, 21 nt, Artificial Seqence
  siRNA antisense strand against b2GPI
uuuaucaccauguagcauucc

SEQ ID NO: 2105 - RNA, 21 nt, Artificial Seqence
  siRNA antisense strand against b2GPI
cuuuaucaccauguagcauuc

SEQ ID NO: 2106 - RNA, 21 nt, Artificial Seqence
  siRNA antisense strand against b2GPI
acuuuaucaccauguagcauu

SEQ ID NO: 2107 - RNA, 21 nt, Artificial Seqence
  siRNA antisense strand against b2GPI
aacuuuaucaccauguagcau

SEQ ID NO: 2108 - RNA, 21 nt, Artificial Seqence
  siRNA antisense strand against b2GPI
aaacuuuaucaccauguagca

SEQ ID NO: 2109 - RNA, 21 nt, Artificial Seqence
  siRNA antisense strand against b2GPI
gaaacuuuaucaccauguagc

SEQ ID NO: 2110 - RNA, 21 nt, Artificial Seqence
  siRNA antisense strand against b2GPI
agaaacuuuaucaccauguag

SEQ ID NO: 2111 - RNA, 21 nt, Artificial Seqence
  siRNA antisense strand against b2GPI
aagaaacuuuaucaccaugua

SEQ ID NO: 2112 - RNA, 21 nt, Artificial Seqence
  siRNA antisense strand against b2GPI
aaagaaacuuuaucaccaugu

SEQ ID NO: 2113 - RNA, 21 nt, Artificial Seqence
  siRNA antisense strand against b2GPI
gaaagaaacuuuaucaccaug

SEQ ID NO: 2114 - RNA, 21 nt, Artificial Seqence
  siRNA antisense strand against b2GPI
agaaagaaacuuuaucaccau

SEQ ID NO: 2115 - RNA, 21 nt, Artificial Seqence
  siRNA antisense strand against b2GPI
aagaaagaaacuuuaucacca

SEQ ID NO: 2116 - RNA, 21 nt, Artificial Seqence
  siRNA antisense strand against b2GPI
gaagaaagaaacuuuaucacc

SEQ ID NO: 2117 - RNA, 21 nt, Artificial Seqence
  siRNA antisense strand against b2GPI
agaagaaagaaacuuuaucac

SEQ ID NO: 2118 - RNA, 21 nt, Artificial Seqence
  siRNA antisense strand against b2GPI
cagaagaaagaaacuuuauca

SEQ ID NO: 2119 - RNA, 21 nt, Artificial Seqence
  siRNA antisense strand against b2GPI
gcagaagaaagaaacuuuauc

SEQ ID NO: 2120 - RNA, 21 nt, Artificial Seqence
  siRNA antisense strand against b2GPI
ugcagaagaaagaaacuuuau

SEQ ID NO: 2121 - RNA, 21 nt, Artificial Seqence
  siRNA antisense strand against b2GPI
uugcagaagaaagaaacuuua

SEQ ID NO: 2122 - RNA, 21 nt, Artificial Seqence
  siRNA antisense strand against b2GPI
uuugcagaagaaagaaacuuu

SEQ ID NO: 2123 - RNA, 21 nt, Artificial Seqence
  siRNA antisense strand against b2GPI
uuuugcagaagaaagaaacuu

SEQ ID NO: 2124 - RNA, 21 nt, Artificial Seqence
  siRNA antisense strand against b2GPI
uuuuugcagaagaaagaaacu

SEQ ID NO: 2125 - RNA, 21 nt, Artificial Seqence
  siRNA antisense strand against b2GPI
auuuuugcagaagaaagaaac

SEQ ID NO: 2126 - RNA, 21 nt, Artificial Seqence
  siRNA antisense strand against b2GPI
uauuuuugcagaagaaagaaa

SEQ ID NO: 2127 - RNA, 21 nt, Artificial Seqence
  siRNA antisense strand against b2GPI
uuauuuuugcagaagaaagaa

SEQ ID NO: 2128 - RNA, 21 nt, Artificial Seqence
  siRNA antisense strand against b2GPI
cuuauuuuugcagaagaaaga

SEQ ID NO: 2129 - RNA, 21 nt, Artificial Seqence
  siRNA antisense strand against b2GPI
ccuuauuuuugcagaagaaag

SEQ ID NO: 2130 - RNA, 21 nt, Artificial Seqence
  siRNA antisense strand against b2GPI
uccuuauuuuugcagaagaaa

SEQ ID NO: 2131 - RNA, 21 nt, Artificial Seqence
  siRNA antisense strand against b2GPI
uuccuuauuuuugcagaagaa

SEQ ID NO: 2132 - RNA, 21 nt, Artificial Seqence
  siRNA antisense strand against b2GPI
uuuccuuauuuuugcagaaga

SEQ ID NO: 2133 - RNA, 21 nt, Artificial Seqence
  siRNA antisense strand against b2GPI
uuuuccuuauuuuugcagaag

SEQ ID NO: 2134 - RNA, 21 nt, Artificial Seqence
  siRNA antisense strand against b2GPI
cuuuuccuuauuuuugcagaa

SEQ ID NO: 2135 - RNA, 21 nt, Artificial Seqence
  siRNA antisense strand against b2GPI
ucuuuuccuuauuuuugcaga

SEQ ID NO: 2136 - RNA, 21 nt, Artificial Seqence
  siRNA antisense strand against b2GPI
uucuuuuccuuauuuuugcag

SEQ ID NO: 2137 - RNA, 21 nt, Artificial Seqence
  siRNA antisense strand against b2GPI
cuucuuuuccuuauuuuugca

SEQ ID NO: 2138 - RNA, 21 nt, Artificial Seqence
  siRNA antisense strand against b2GPI
acuucuuuuccuuauuuuugc

SEQ ID NO: 2139 - RNA, 21 nt, Artificial Seqence
  siRNA antisense strand against b2GPI
cacuucuuuuccuuauuuuug

SEQ ID NO: 2140 - RNA, 21 nt, Artificial Seqence
  siRNA antisense strand against b2GPI
acacuucuuuuccuuauuuuu

SEQ ID NO: 2141 - RNA, 21 nt, Artificial Seqence
  siRNA antisense strand against b2GPI
uacacuucuuuuccuuauuuu

SEQ ID NO: 2142 - RNA, 21 nt, Artificial Seqence
  siRNA antisense strand against b2GPI
cuacacuucuuuuccuuauuu

SEQ ID NO: 2143 - RNA, 21 nt, Artificial Seqence
  siRNA antisense strand against b2GPI
gcuacacuucuuuuccuuauu

SEQ ID NO: 2144 - RNA, 21 nt, Artificial Seqence
  siRNA antisense strand against b2GPI
agcuacacuucuuuuccuuau

SEQ ID NO: 2145 - RNA, 21 nt, Artificial Seqence
  siRNA antisense strand against b2GPI
uagcuacacuucuuuuccuua

SEQ ID NO: 2146 - RNA, 21 nt, Artificial Seqence
  siRNA antisense strand against b2GPI
auagcuacacuucuuuuccuu

SEQ ID NO: 2147 - RNA, 21 nt, Artificial Seqence
  siRNA antisense strand against b2GPI
uauagcuacacuucuuuuccu

SEQ ID NO: 2148 - RNA, 21 nt, Artificial Seqence
  siRNA antisense strand against b2GPI
guauagcuacacuucuuuucc

SEQ ID NO: 2149 - RNA, 21 nt, Artificial Seqence
  siRNA antisense strand against b2GPI
uguauagcuacacuucuuuuc

SEQ ID NO: 2150 - RNA, 21 nt, Artificial Seqence
  siRNA antisense strand against b2GPI
cuguauagcuacacuucuuuu

SEQ ID NO: 2151 - RNA, 21 nt, Artificial Seqence
  siRNA antisense strand against b2GPI
ucuguauagcuacacuucuuu

SEQ ID NO: 2152 - RNA, 21 nt, Artificial Seqence
  siRNA antisense strand against b2GPI
cucuguauagcuacacuucuu

SEQ ID NO: 2153 - RNA, 21 nt, Artificial Seqence
  siRNA antisense strand against b2GPI
ccucuguauagcuacacuucu

SEQ ID NO: 2154 - RNA, 21 nt, Artificial Seqence
  siRNA antisense strand against b2GPI
uccucuguauagcuacacuuc

SEQ ID NO: 2155 - RNA, 21 nt, Artificial Seqence
  siRNA antisense strand against b2GPI
auccucuguauagcuacacuu

SEQ ID NO: 2156 - RNA, 21 nt, Artificial Seqence
  siRNA antisense strand against b2GPI
cauccucuguauagcuacacu

SEQ ID NO: 2157 - RNA, 21 nt, Artificial Seqence
  siRNA antisense strand against b2GPI
gcauccucuguauagcuacac

SEQ ID NO: 2158 - RNA, 21 nt, Artificial Seqence
  siRNA antisense strand against b2GPI
agcauccucuguauagcuaca

SEQ ID NO: 2159 - RNA, 21 nt, Artificial Seqence
  siRNA antisense strand against b2GPI
gagcauccucuguauagcuac

SEQ ID NO: 2160 - RNA, 21 nt, Artificial Seqence
  siRNA antisense strand against b2GPI
ugagcauccucuguauagcua

SEQ ID NO: 2161 - RNA, 21 nt, Artificial Seqence
  siRNA antisense strand against b2GPI
cugagcauccucuguauagcu

SEQ ID NO: 2162 - RNA, 21 nt, Artificial Seqence
  siRNA antisense strand against b2GPI
acugagcauccucuguauagc

SEQ ID NO: 2163 - RNA, 21 nt, Artificial Seqence
  siRNA antisense strand against b2GPI
cacugagcauccucuguauag

SEQ ID NO: 2164 - RNA, 21 nt, Artificial Seqence
  siRNA antisense strand against b2GPI
acacugagcauccucuguaua

SEQ ID NO: 2165 - RNA, 21 nt, Artificial Seqence
  siRNA antisense strand against b2GPI
uacacugagcauccucuguau

SEQ ID NO: 2166 - RNA, 21 nt, Artificial Seqence
  siRNA antisense strand against b2GPI
auacacugagcauccucugua

SEQ ID NO: 2167 - RNA, 21 nt, Artificial Seqence
  siRNA antisense strand against b2GPI
uauacacugagcauccucugu

SEQ ID NO: 2168 - RNA, 21 nt, Artificial Seqence
  siRNA antisense strand against b2GPI
cuauacacugagcauccucug

SEQ ID NO: 2169 - RNA, 21 nt, Artificial Seqence
  siRNA antisense strand against b2GPI
ucuauacacugagcauccucu

SEQ ID NO: 2170 - RNA, 21 nt, Artificial Seqence
  siRNA antisense strand against b2GPI
aucuauacacugagcauccuc

SEQ ID NO: 2171 - RNA, 21 nt, Artificial Seqence
  siRNA antisense strand against b2GPI
caucuauacacugagcauccu

SEQ ID NO: 2172 - RNA, 21 nt, Artificial Seqence
  siRNA antisense strand against b2GPI
ccaucuauacacugagcaucc

SEQ ID NO: 2173 - RNA, 21 nt, Artificial Seqence
  siRNA antisense strand against b2GPI
gccaucuauacacugagcauc

SEQ ID NO: 2174 - RNA, 21 nt, Artificial Seqence
  siRNA antisense strand against b2GPI
ugccaucuauacacugagcau

SEQ ID NO: 2175 - RNA, 21 nt, Artificial Seqence
  siRNA antisense strand against b2GPI
gugccaucuauacacugagca

SEQ ID NO: 2176 - RNA, 21 nt, Artificial Seqence
  siRNA antisense strand against b2GPI
agugccaucuauacacugagc

SEQ ID NO: 2177 - RNA, 21 nt, Artificial Seqence
  siRNA antisense strand against b2GPI
uagugccaucuauacacugag

SEQ ID NO: 2178 - RNA, 21 nt, Artificial Seqence
  siRNA antisense strand against b2GPI
auagugccaucuauacacuga

SEQ ID NO: 2179 - RNA, 21 nt, Artificial Seqence
  siRNA antisense strand against b2GPI
gauagugccaucuauacacug

SEQ ID NO: 2180 - RNA, 21 nt, Artificial Seqence
  siRNA antisense strand against b2GPI
cgauagugccaucuauacacu

SEQ ID NO: 2181 - RNA, 21 nt, Artificial Seqence
  siRNA antisense strand against b2GPI
ucgauagugccaucuauacac

SEQ ID NO: 2182 - RNA, 21 nt, Artificial Seqence
  siRNA antisense strand against b2GPI
uucgauagugccaucuauaca

SEQ ID NO: 2183 - RNA, 21 nt, Artificial Seqence
  siRNA antisense strand against b2GPI
cuucgauagugccaucuauac

SEQ ID NO: 2184 - RNA, 21 nt, Artificial Seqence
  siRNA antisense strand against b2GPI
acuucgauagugccaucuaua

SEQ ID NO: 2185 - RNA, 21 nt, Artificial Seqence
  siRNA antisense strand against b2GPI
gacuucgauagugccaucuau

SEQ ID NO: 2186 - RNA, 21 nt, Artificial Seqence
  siRNA antisense strand against b2GPI
ggacuucgauagugccaucua

SEQ ID NO: 2187 - RNA, 21 nt, Artificial Seqence
  siRNA antisense strand against b2GPI
gggacuucgauagugccaucu

SEQ ID NO: 2188 - RNA, 21 nt, Artificial Seqence
  siRNA antisense strand against b2GPI
ggggacuucgauagugccauc

SEQ ID NO: 2189 - RNA, 21 nt, Artificial Seqence
  siRNA antisense strand against b2GPI
uggggacuucgauagugccau

SEQ ID NO: 2190 - RNA, 21 nt, Artificial Seqence
  siRNA antisense strand against b2GPI
uuggggacuucgauagugcca

SEQ ID NO: 2191 - RNA, 21 nt, Artificial Seqence
  siRNA antisense strand against b2GPI
uuuggggacuucgauagugcc

SEQ ID NO: 2192 - RNA, 21 nt, Artificial Seqence
  siRNA antisense strand against b2GPI
auuuggggacuucgauagugc

SEQ ID NO: 2193 - RNA, 21 nt, Artificial Seqence
  siRNA antisense strand against b2GPI
cauuuggggacuucgauagug

SEQ ID NO: 2194 - RNA, 21 nt, Artificial Seqence
  siRNA antisense strand against b2GPI
gcauuuggggacuucgauagu

SEQ ID NO: 2195 - RNA, 21 nt, Artificial Seqence
  siRNA antisense strand against b2GPI
agcauuuggggacuucgauag

SEQ ID NO: 2196 - RNA, 21 nt, Artificial Seqence
  siRNA antisense strand against b2GPI
aagcauuuggggacuucgaua

SEQ ID NO: 2197 - RNA, 21 nt, Artificial Seqence
  siRNA antisense strand against b2GPI
gaagcauuuggggacuucgau

SEQ ID NO: 2198 - RNA, 21 nt, Artificial Seqence
  siRNA antisense strand against b2GPI
ugaagcauuuggggacuucga

SEQ ID NO: 2199 - RNA, 21 nt, Artificial Seqence
  siRNA antisense strand against b2GPI
uugaagcauuuggggacuucg

SEQ ID NO: 2200 - RNA, 21 nt, Artificial Seqence
  siRNA antisense strand against b2GPI
cuugaagcauuuggggacuuc

SEQ ID NO: 2201 - RNA, 21 nt, Artificial Seqence
  siRNA antisense strand against b2GPI
ccuugaagcauuuggggacuu

SEQ ID NO: 2202 - RNA, 21 nt, Artificial Seqence
  siRNA antisense strand against b2GPI
uccuugaagcauuuggggacu

SEQ ID NO: 2203 - RNA, 21 nt, Artificial Seqence
  siRNA antisense strand against b2GPI
uuccuugaagcauuuggggac

SEQ ID NO: 2204 - RNA, 21 nt, Artificial Seqence
  siRNA antisense strand against b2GPI
guuccuugaagcauuugggga

SEQ ID NO: 2205 - RNA, 21 nt, Artificial Seqence
  siRNA antisense strand against b2GPI
uguuccuugaagcauuugggg

SEQ ID NO: 2206 - RNA, 21 nt, Artificial Seqence
  siRNA antisense strand against b2GPI
guguuccuugaagcauuuggg

SEQ ID NO: 2207 - RNA, 21 nt, Artificial Seqence
  siRNA antisense strand against b2GPI
uguguuccuugaagcauuugg

SEQ ID NO: 2208 - RNA, 21 nt, Artificial Seqence
  siRNA antisense strand against b2GPI
cuguguuccuugaagcauuug

SEQ ID NO: 2209 - RNA, 21 nt, Artificial Seqence
  siRNA antisense strand against b2GPI
acuguguuccuugaagcauuu

SEQ ID NO: 2210 - RNA, 21 nt, Artificial Seqence
  siRNA antisense strand against b2GPI
aacuguguuccuugaagcauu

SEQ ID NO: 2211 - RNA, 21 nt, Artificial Seqence
  siRNA antisense strand against b2GPI
gaacuguguuccuugaagcau

SEQ ID NO: 2212 - RNA, 21 nt, Artificial Seqence
  siRNA antisense strand against b2GPI
agaacuguguuccuugaagca

SEQ ID NO: 2213 - RNA, 21 nt, Artificial Seqence
  siRNA antisense strand against b2GPI
gagaacuguguuccuugaagc

SEQ ID NO: 2214 - RNA, 21 nt, Artificial Seqence
  siRNA antisense strand against b2GPI
agagaacuguguuccuugaag

SEQ ID NO: 2215 - RNA, 21 nt, Artificial Seqence
  siRNA antisense strand against b2GPI
cagagaacuguguuccuugaa

SEQ ID NO: 2216 - RNA, 21 nt, Artificial Seqence
  siRNA antisense strand against b2GPI
ccagagaacuguguuccuuga

SEQ ID NO: 2217 - RNA, 21 nt, Artificial Seqence
  siRNA antisense strand against b2GPI
gccagagaacuguguuccuug

SEQ ID NO: 2218 - RNA, 21 nt, Artificial Seqence
  siRNA antisense strand against b2GPI
agccagagaacuguguuccuu

SEQ ID NO: 2219 - RNA, 21 nt, Artificial Seqence
  siRNA antisense strand against b2GPI
aagccagagaacuguguuccu

SEQ ID NO: 2220 - RNA, 21 nt, Artificial Seqence
  siRNA antisense strand against b2GPI
aaagccagagaacuguguucc

SEQ ID NO: 2221 - RNA, 21 nt, Artificial Seqence
  siRNA antisense strand against b2GPI
aaaagccagagaacuguguuc

SEQ ID NO: 2222 - RNA, 21 nt, Artificial Seqence
  siRNA antisense strand against b2GPI
aaaaagccagagaacuguguu

SEQ ID NO: 2223 - RNA, 21 nt, Artificial Seqence
  siRNA antisense strand against b2GPI
caaaaagccagagaacugugu

SEQ ID NO: 2224 - RNA, 21 nt, Artificial Seqence
  siRNA antisense strand against b2GPI
ccaaaaagccagagaacugug

SEQ ID NO: 2225 - RNA, 21 nt, Artificial Seqence
  siRNA antisense strand against b2GPI
uccaaaaagccagagaacugu

SEQ ID NO: 2226 - RNA, 21 nt, Artificial Seqence
  siRNA antisense strand against b2GPI
uuccaaaaagccagagaacug

SEQ ID NO: 2227 - RNA, 21 nt, Artificial Seqence
  siRNA antisense strand against b2GPI
uuuccaaaaagccagagaacu

SEQ ID NO: 2228 - RNA, 21 nt, Artificial Seqence
  siRNA antisense strand against b2GPI
uuuuccaaaaagccagagaac

SEQ ID NO: 2229 - RNA, 21 nt, Artificial Seqence
  siRNA antisense strand against b2GPI
guuuuccaaaaagccagagaa

SEQ ID NO: 2230 - RNA, 21 nt, Artificial Seqence
  siRNA antisense strand against b2GPI
aguuuuccaaaaagccagaga

SEQ ID NO: 2231 - RNA, 21 nt, Artificial Seqence
  siRNA antisense strand against b2GPI
caguuuuccaaaaagccagag

SEQ ID NO: 2232 - RNA, 21 nt, Artificial Seqence
  siRNA antisense strand against b2GPI
ucaguuuuccaaaaagccaga

SEQ ID NO: 2233 - RNA, 21 nt, Artificial Seqence
  siRNA antisense strand against b2GPI
aucaguuuuccaaaaagccag

SEQ ID NO: 2234 - RNA, 21 nt, Artificial Seqence
  siRNA antisense strand against b2GPI
caucaguuuuccaaaaagcca

SEQ ID NO: 2235 - RNA, 21 nt, Artificial Seqence
  siRNA antisense strand against b2GPI
gcaucaguuuuccaaaaagcc

SEQ ID NO: 2236 - RNA, 21 nt, Artificial Seqence
  siRNA antisense strand against b2GPI
ugcaucaguuuuccaaaaagc

SEQ ID NO: 2237 - RNA, 21 nt, Artificial Seqence
  siRNA antisense strand against b2GPI
augcaucaguuuuccaaaaag

SEQ ID NO: 2238 - RNA, 21 nt, Artificial Seqence
  siRNA antisense strand against b2GPI
gaugcaucaguuuuccaaaaa

SEQ ID NO: 2239 - RNA, 21 nt, Artificial Seqence
  siRNA antisense strand against b2GPI
ggaugcaucaguuuuccaaaa

SEQ ID NO: 2240 - RNA, 21 nt, Artificial Seqence
  siRNA antisense strand against b2GPI
cggaugcaucaguuuuccaaa

SEQ ID NO: 2241 - RNA, 21 nt, Artificial Seqence
  siRNA antisense strand against b2GPI
ucggaugcaucaguuuuccaa

SEQ ID NO: 2242 - RNA, 21 nt, Artificial Seqence
  siRNA antisense strand against b2GPI
aucggaugcaucaguuuucca

SEQ ID NO: 2243 - RNA, 21 nt, Artificial Seqence
  siRNA antisense strand against b2GPI
caucggaugcaucaguuuucc

SEQ ID NO: 2244 - RNA, 21 nt, Artificial Seqence
  siRNA antisense strand against b2GPI
acaucggaugcaucaguuuuc

SEQ ID NO: 2245 - RNA, 21 nt, Artificial Seqence
  siRNA antisense strand against b2GPI
uacaucggaugcaucaguuuu

SEQ ID NO: 2246 - RNA, 21 nt, Artificial Seqence
  siRNA antisense strand against b2GPI
uuacaucggaugcaucaguuu

SEQ ID NO: 2247 - RNA, 21 nt, Artificial Seqence
  siRNA antisense strand against b2GPI
uuuacaucggaugcaucaguu

SEQ ID NO: 2248 - RNA, 21 nt, Artificial Seqence
  siRNA antisense strand against b2GPI
cuuuacaucggaugcaucagu

SEQ ID NO: 2249 - RNA, 21 nt, Artificial Seqence
  siRNA antisense strand against b2GPI
gcuuuacaucggaugcaucag

SEQ ID NO: 2250 - RNA, 21 nt, Artificial Seqence
  siRNA antisense strand against b2GPI
ggcuuuacaucggaugcauca

SEQ ID NO: 2251 - RNA, 21 nt, Artificial Seqence
  siRNA antisense strand against b2GPI
uggcuuuacaucggaugcauc

SEQ ID NO: 2252 - RNA, 21 nt, Artificial Seqence
  siRNA antisense strand against b2GPI
auggcuuuacaucggaugcau

SEQ ID NO: 2253 - RNA, 21 nt, Artificial Seqence
  siRNA antisense strand against b2GPI
cauggcuuuacaucggaugca

SEQ ID NO: 2254 - RNA, 21 nt, Artificial Seqence
  siRNA antisense strand against b2GPI
gcauggcuuuacaucggaugc

SEQ ID NO: 2255 - RNA, 21 nt, Artificial Seqence
  siRNA antisense strand against b2GPI
agcauggcuuuacaucggaug

SEQ ID NO: 2256 - RNA, 21 nt, Artificial Seqence
  siRNA antisense strand against b2GPI
uagcauggcuuuacaucggau

SEQ ID NO: 2257 - RNA, 21 nt, Artificial Seqence
  siRNA antisense strand against b2GPI
uuagcauggcuuuacaucgga

SEQ ID NO: 2258 - RNA, 21 nt, Artificial Seqence
  siRNA antisense strand against b2GPI
cuuagcauggcuuuacaucgg

SEQ ID NO: 2259 - RNA, 21 nt, Artificial Seqence
  siRNA antisense strand against b2GPI
ccuuagcauggcuuuacaucg

SEQ ID NO: 2260 - RNA, 21 nt, Artificial Seqence
  siRNA antisense strand against b2GPI
accuuagcauggcuuuacauc

SEQ ID NO: 2261 - RNA, 21 nt, Artificial Seqence
  siRNA antisense strand against b2GPI
caccuuagcauggcuuuacau

SEQ ID NO: 2262 - RNA, 21 nt, Artificial Seqence
  siRNA antisense strand against b2GPI
ccaccuuagcauggcuuuaca

SEQ ID NO: 2263 - RNA, 21 nt, Artificial Seqence
  siRNA antisense strand against b2GPI
accaccuuagcauggcuuuac

SEQ ID NO: 2264 - RNA, 21 nt, Artificial Seqence
  siRNA antisense strand against b2GPI
aaccaccuuagcauggcuuua

SEQ ID NO: 2265 - RNA, 21 nt, Artificial Seqence
  siRNA antisense strand against b2GPI
aaaccaccuuagcauggcuuu

SEQ ID NO: 2266 - RNA, 21 nt, Artificial Seqence
  siRNA antisense strand against b2GPI
aaaaccaccuuagcauggcuu

SEQ ID NO: 2267 - RNA, 21 nt, Artificial Seqence
  siRNA antisense strand against b2GPI
gaaaaccaccuuagcauggcu

SEQ ID NO: 2268 - RNA, 21 nt, Artificial Seqence
  siRNA antisense strand against b2GPI
ugaaaaccaccuuagcauggc

SEQ ID NO: 2269 - RNA, 21 nt, Artificial Seqence
  siRNA antisense strand against b2GPI
cugaaaaccaccuuagcaugg

SEQ ID NO: 2270 - RNA, 21 nt, Artificial Seqence
  siRNA antisense strand against b2GPI
ucugaaaaccaccuuagcaug

SEQ ID NO: 2271 - RNA, 21 nt, Artificial Seqence
  siRNA antisense strand against b2GPI
aucugaaaaccaccuuagcau

SEQ ID NO: 2272 - RNA, 21 nt, Artificial Seqence
  siRNA antisense strand against b2GPI
aaucugaaaaccaccuuagca

SEQ ID NO: 2273 - RNA, 21 nt, Artificial Seqence
  siRNA antisense strand against b2GPI
gaaucugaaaaccaccuuagc

SEQ ID NO: 2274 - RNA, 21 nt, Artificial Seqence
  siRNA antisense strand against b2GPI
ggaaucugaaaaccaccuuag

SEQ ID NO: 2275 - RNA, 21 nt, Artificial Seqence
  siRNA antisense strand against b2GPI
uggaaucugaaaaccaccuua

SEQ ID NO: 2276 - RNA, 21 nt, Artificial Seqence
  siRNA antisense strand against b2GPI
guggaaucugaaaaccaccuu

SEQ ID NO: 2277 - RNA, 21 nt, Artificial Seqence
  siRNA antisense strand against b2GPI
uguggaaucugaaaaccaccu

SEQ ID NO: 2278 - RNA, 21 nt, Artificial Seqence
  siRNA antisense strand against b2GPI
guguggaaucugaaaaccacc

SEQ ID NO: 2279 - RNA, 21 nt, Artificial Seqence
  siRNA antisense strand against b2GPI
uguguggaaucugaaaaccac

SEQ ID NO: 2280 - RNA, 21 nt, Artificial Seqence
  siRNA antisense strand against b2GPI
uuguguggaaucugaaaacca

SEQ ID NO: 2281 - RNA, 21 nt, Artificial Seqence
  siRNA antisense strand against b2GPI
uuuguguggaaucugaaaacc

SEQ ID NO: 2282 - RNA, 21 nt, Artificial Seqence
  siRNA antisense strand against b2GPI
uuuuguguggaaucugaaaac

SEQ ID NO: 2283 - RNA, 21 nt, Artificial Seqence
  siRNA antisense strand against b2GPI
auuuuguguggaaucugaaaa

SEQ ID NO: 2284 - RNA, 21 nt, Artificial Seqence
  siRNA antisense strand against b2GPI
cauuuuguguggaaucugaaa

SEQ ID NO: 2285 - RNA, 21 nt, Artificial Seqence
  siRNA antisense strand against b2GPI
acauuuuguguggaaucugaa

SEQ ID NO: 2286 - RNA, 21 nt, Artificial Seqence
  siRNA antisense strand against b2GPI
gacauuuuguguggaaucuga

SEQ ID NO: 2287 - RNA, 21 nt, Artificial Seqence
  siRNA antisense strand against b2GPI
ugacauuuuguguggaaucug

SEQ ID NO: 2288 - RNA, 21 nt, Artificial Seqence
  siRNA antisense strand against b2GPI
gugacauuuuguguggaaucu

SEQ ID NO: 2289 - RNA, 21 nt, Artificial Seqence
  siRNA antisense strand against b2GPI
ugugacauuuuguguggaauc

SEQ ID NO: 2290 - RNA, 21 nt, Artificial Seqence
  siRNA antisense strand against b2GPI
gugugacauuuuguguggaau

SEQ ID NO: 2291 - RNA, 21 nt, Artificial Seqence
  siRNA antisense strand against b2GPI
agugugacauuuuguguggaa

SEQ ID NO: 2292 - RNA, 21 nt, Artificial Seqence
  siRNA antisense strand against b2GPI
aagugugacauuuugugugga

SEQ ID NO: 2293 - RNA, 21 nt, Artificial Seqence
  siRNA antisense strand against b2GPI
caagugugacauuuugugugg

SEQ ID NO: 2294 - RNA, 21 nt, Artificial Seqence
  siRNA antisense strand against b2GPI
acaagugugacauuuugugug

SEQ ID NO: 2295 - RNA, 21 nt, Artificial Seqence
  siRNA antisense strand against b2GPI
aacaagugugacauuuugugu

SEQ ID NO: 2296 - RNA, 21 nt, Artificial Seqence
  siRNA antisense strand against b2GPI
aaacaagugugacauuuugug

SEQ ID NO: 2297 - RNA, 21 nt, Artificial Seqence
  siRNA antisense strand against b2GPI
gaaacaagugugacauuuugu

SEQ ID NO: 2298 - RNA, 21 nt, Artificial Seqence
  siRNA antisense strand against b2GPI
agaaacaagugugacauuuug

SEQ ID NO: 2299 - RNA, 21 nt, Artificial Seqence
  siRNA antisense strand against b2GPI
aagaaacaagugugacauuuu

SEQ ID NO: 2300 - RNA, 21 nt, Artificial Seqence
  siRNA antisense strand against b2GPI
caagaaacaagugugacauuu

SEQ ID NO: 2301 - RNA, 21 nt, Artificial Seqence
  siRNA antisense strand against b2GPI
acaagaaacaagugugacauu

SEQ ID NO: 2302 - RNA, 21 nt, Artificial Seqence
  siRNA antisense strand against b2GPI
aacaagaaacaagugugacau

SEQ ID NO: 2303 - RNA, 21 nt, Artificial Seqence
  siRNA antisense strand against b2GPI
gaacaagaaacaagugugaca

SEQ ID NO: 2304 - RNA, 21 nt, Artificial Seqence
  siRNA antisense strand against b2GPI
ugaacaagaaacaagugugac

SEQ ID NO: 2305 - RNA, 21 nt, Artificial Seqence
  siRNA antisense strand against b2GPI
augaacaagaaacaaguguga

SEQ ID NO: 2306 - RNA, 21 nt, Artificial Seqence
  siRNA antisense strand against b2GPI
gaugaacaagaaacaagugug

SEQ ID NO: 2307 - RNA, 21 nt, Artificial Seqence
  siRNA antisense strand against b2GPI
ggaugaacaagaaacaagugu

SEQ ID NO: 2308 - RNA, 21 nt, Artificial Seqence
  siRNA antisense strand against b2GPI
uggaugaacaagaaacaagug

SEQ ID NO: 2309 - RNA, 21 nt, Artificial Seqence
  siRNA antisense strand against b2GPI
uuggaugaacaagaaacaagu

SEQ ID NO: 2310 - RNA, 21 nt, Artificial Seqence
  siRNA antisense strand against b2GPI
cuuggaugaacaagaaacaag

SEQ ID NO: 2311 - RNA, 21 nt, Artificial Seqence
  siRNA antisense strand against b2GPI
ccuuggaugaacaagaaacaa

SEQ ID NO: 2312 - RNA, 21 nt, Artificial Seqence
  siRNA antisense strand against b2GPI
uccuuggaugaacaagaaaca

SEQ ID NO: 2313 - RNA, 21 nt, Artificial Seqence
  siRNA antisense strand against b2GPI
uuccuuggaugaacaagaaac

SEQ ID NO: 2314 - RNA, 21 nt, Artificial Seqence
  siRNA antisense strand against b2GPI
guuccuuggaugaacaagaaa

SEQ ID NO: 2315 - RNA, 21 nt, Artificial Seqence
  siRNA antisense strand against b2GPI
gguuccuuggaugaacaagaa

SEQ ID NO: 2316 - RNA, 21 nt, Artificial Seqence
  siRNA antisense strand against b2GPI
agguuccuuggaugaacaaga

SEQ ID NO: 2317 - RNA, 21 nt, Artificial Seqence
  siRNA antisense strand against b2GPI
uagguuccuuggaugaacaag

SEQ ID NO: 2318 - RNA, 21 nt, Artificial Seqence
  siRNA antisense strand against b2GPI
uuagguuccuuggaugaacaa

SEQ ID NO: 2319 - RNA, 21 nt, Artificial Seqence
  siRNA antisense strand against b2GPI
auuagguuccuuggaugaaca

SEQ ID NO: 2320 - RNA, 21 nt, Artificial Seqence
  siRNA antisense strand against b2GPI
aauuagguuccuuggaugaac

SEQ ID NO: 2321 - RNA, 21 nt, Artificial Seqence
  siRNA antisense strand against b2GPI
caauuagguuccuuggaugaa

SEQ ID NO: 2322 - RNA, 21 nt, Artificial Seqence
  siRNA antisense strand against b2GPI
ucaauuagguuccuuggauga

SEQ ID NO: 2323 - RNA, 21 nt, Artificial Seqence
  siRNA antisense strand against b2GPI
uucaauuagguuccuuggaug

SEQ ID NO: 2324 - RNA, 21 nt, Artificial Seqence
  siRNA antisense strand against b2GPI
uuucaauuagguuccuuggau

SEQ ID NO: 2325 - RNA, 21 nt, Artificial Seqence
  siRNA antisense strand against b2GPI
auuucaauuagguuccuugga

SEQ ID NO: 2326 - RNA, 21 nt, Artificial Seqence
  siRNA antisense strand against b2GPI
aauuucaauuagguuccuugg

SEQ ID NO: 2327 - RNA, 21 nt, Artificial Seqence
  siRNA antisense strand against b2GPI
aaauuucaauuagguuccuug

SEQ ID NO: 2328 - RNA, 21 nt, Artificial Seqence
  siRNA antisense strand against b2GPI
uaaauuucaauuagguuccuu

SEQ ID NO: 2329 - RNA, 21 nt, Artificial Seqence
  siRNA antisense strand against b2GPI
uuaaauuucaauuagguuccu

SEQ ID NO: 2330 - RNA, 21 nt, Artificial Seqence
  siRNA antisense strand against b2GPI
uuuaaauuucaauuagguucc

SEQ ID NO: 2331 - RNA, 21 nt, Artificial Seqence
  siRNA antisense strand against b2GPI
uuuuaaauuucaauuagguuc

SEQ ID NO: 2332 - RNA, 21 nt, Artificial Seqence
  siRNA antisense strand against b2GPI
uuuuuaaauuucaauuagguu

SEQ ID NO: 2333 - RNA, 21 nt, Artificial Seqence
  siRNA antisense strand against b2GPI
auuuuuaaauuucaauuaggu

SEQ ID NO: 2334 - RNA, 21 nt, Artificial Seqence
  siRNA antisense strand against b2GPI
uauuuuuaaauuucaauuagg

SEQ ID NO: 2335 - RNA, 21 nt, Artificial Seqence
  siRNA antisense strand against b2GPI
uuauuuuuaaauuucaauuag

SEQ ID NO: 2336 - RNA, 21 nt, Artificial Seqence
  siRNA antisense strand against b2GPI
uuuauuuuuaaauuucaauua

SEQ ID NO: 2337 - RNA, 21 nt, Artificial Seqence
  siRNA antisense strand against b2GPI
cuuuauuuuuaaauuucaauu

SEQ ID NO: 2338 - RNA, 21 nt, Artificial Seqence
  siRNA antisense strand against b2GPI
gcuuuauuuuuaaauuucaau

SEQ ID NO: 2339 - RNA, 21 nt, Artificial Seqence
  siRNA antisense strand against b2GPI
agcuuuauuuuuaaauuucaa

SEQ ID NO: 2340 - RNA, 21 nt, Artificial Seqence
  siRNA antisense strand against b2GPI
uagcuuuauuuuuaaauuuca

SEQ ID NO: 2341 - RNA, 21 nt, Artificial Seqence
  siRNA antisense strand against b2GPI
guagcuuuauuuuuaaauuuc

SEQ ID NO: 2342 - RNA, 21 nt, Artificial Seqence
  siRNA antisense strand against b2GPI
aguagcuuuauuuuuaaauuu

SEQ ID NO: 2343 - RNA, 21 nt, Artificial Seqence
  siRNA antisense strand against b2GPI
caguagcuuuauuuuuaaauu

SEQ ID NO: 2344 - RNA, 21 nt, Artificial Seqence
  siRNA antisense strand against b2GPI
ucaguagcuuuauuuuuaaau

SEQ ID NO: 2345 - RNA, 21 nt, Artificial Seqence
  siRNA antisense strand against b2GPI
uucaguagcuuuauuuuuaaa

SEQ ID NO: 2346 - RNA, 21 nt, Artificial Seqence
  siRNA antisense strand against b2GPI
auucaguagcuuuauuuuuaa

SEQ ID NO: 2347 - RNA, 21 nt, Artificial Seqence
  siRNA antisense strand against b2GPI
aauucaguagcuuuauuuuua

SEQ ID NO: 2348 - RNA, 21 nt, Artificial Seqence
  siRNA antisense strand against b2GPI
aaauucaguagcuuuauuuuu

SEQ ID NO: 2349 - RNA, 21 nt, Artificial Seqence
  siRNA antisense strand against b2GPI
uaaauucaguagcuuuauuuu

SEQ ID NO: 2350 - RNA, 21 nt, Artificial Seqence
  siRNA antisense strand against b2GPI
auaaauucaguagcuuuauuu

SEQ ID NO: 2351 - RNA, 21 nt, Artificial Seqence
  siRNA antisense strand against b2GPI
aauaaauucaguagcuuuauu

SEQ ID NO: 2352 - RNA, 21 nt, Artificial Seqence
  siRNA antisense strand against b2GPI
caauaaauucaguagcuuuau

SEQ ID NO: 2353 - RNA, 21 nt, Artificial Seqence
  siRNA antisense strand against b2GPI
gcaauaaauucaguagcuuua

SEQ ID NO: 2354 - RNA, 21 nt, Artificial Seqence
  siRNA antisense strand against b2GPI
ggcaauaaauucaguagcuuu

SEQ ID NO: 2355 - RNA, 21 nt, Artificial Seqence
  siRNA antisense strand against b2GPI
cggcaauaaauucaguagcuu

SEQ ID NO: 2356 - RNA, 21 nt, Artificial Seqence
  siRNA antisense strand against b2GPI
gcggcaauaaauucaguagcu

SEQ ID NO: 2357 - RNA, 21 nt, Artificial Seqence
  siRNA antisense strand against b2GPI
ugcggcaauaaauucaguagc

SEQ ID NO: 2358 - RNA, 21 nt, Artificial Seqence
  siRNA antisense strand against b2GPI
gugcggcaauaaauucaguag

SEQ ID NO: 2359 - RNA, 21 nt, Artificial Seqence
  siRNA antisense strand against b2GPI
ggugcggcaauaaauucagua

SEQ ID NO: 2360 - RNA, 21 nt, Artificial Seqence
  siRNA antisense strand against b2GPI
gggugcggcaauaaauucagu

SEQ ID NO: 2361 - DNA, 19 bp, Homo sapiens
ctctgtctttttagcagac

SEQ ID NO: 2362 - DNA, 19 bp, Homo sapiens
tctgtctttttagcagacg

SEQ ID NO: 2363 - DNA, 19 bp, Homo sapiens
ctgtctttttagcagacga

SEQ ID NO: 2364 - DNA, 19 bp, Homo sapiens
tgtctttttagcagacgaa

SEQ ID NO: 2365 - DNA, 19 bp, Homo sapiens
gtctttttagcagacgaaa

SEQ ID NO: 2366 - DNA, 19 bp, Homo sapiens
tctttttagcagacgaaaa

SEQ ID NO: 2367 - DNA, 19 bp, Homo sapiens
ctttttagcagacgaaaac

SEQ ID NO: 2368 - DNA, 19 bp, Homo sapiens
tttttagcagacgaaaacc

SEQ ID NO: 2369 - DNA, 19 bp, Homo sapiens
ttttagcagacgaaaacca

SEQ ID NO: 2370 - DNA, 19 bp, Homo sapiens
tttagcagacgaaaaccac

SEQ ID NO: 2371 - DNA, 19 bp, Homo sapiens
ttagcagacgaaaaccact

SEQ ID NO: 2372 - DNA, 19 bp, Homo sapiens
tagcagacgaaaaccactt

SEQ ID NO: 2373 - DNA, 19 bp, Homo sapiens
agcagacgaaaaccacttt

SEQ ID NO: 2374 - DNA, 19 bp, Homo sapiens
gcagacgaaaaccactttg

SEQ ID NO: 2375 - DNA, 19 bp, Homo sapiens
cagacgaaaaccactttgg

SEQ ID NO: 2376 - DNA, 19 bp, Homo sapiens
agacgaaaaccactttggt

SEQ ID NO: 2377 - DNA, 19 bp, Homo sapiens
gacgaaaaccactttggta

SEQ ID NO: 2378 - DNA, 19 bp, Homo sapiens
acgaaaaccactttggtag

SEQ ID NO: 2379 - DNA, 19 bp, Homo sapiens
cgaaaaccactttggtagt

SEQ ID NO: 2380 - DNA, 19 bp, Homo sapiens
gaaaaccactttggtagtg

SEQ ID NO: 2381 - DNA, 19 bp, Homo sapiens
aaaaccactttggtagtgc

SEQ ID NO: 2382 - DNA, 19 bp, Homo sapiens
aaaccactttggtagtgcc

SEQ ID NO: 2383 - DNA, 19 bp, Homo sapiens
aaccactttggtagtgcca

SEQ ID NO: 2384 - DNA, 19 bp, Homo sapiens
accactttggtagtgccag

SEQ ID NO: 2385 - DNA, 19 bp, Homo sapiens
ccactttggtagtgccagt

SEQ ID NO: 2386 - DNA, 19 bp, Homo sapiens
cactttggtagtgccagtg

SEQ ID NO: 2387 - DNA, 19 bp, Homo sapiens
actttggtagtgccagtgt

SEQ ID NO: 2388 - DNA, 19 bp, Homo sapiens
ctttggtagtgccagtgtg

SEQ ID NO: 2389 - DNA, 19 bp, Homo sapiens
tttggtagtgccagtgtga

SEQ ID NO: 2390 - DNA, 19 bp, Homo sapiens
ttggtagtgccagtgtgac

SEQ ID NO: 2391 - DNA, 19 bp, Homo sapiens
tggtagtgccagtgtgact

SEQ ID NO: 2392 - DNA, 19 bp, Homo sapiens
ggtagtgccagtgtgactc

SEQ ID NO: 2393 - DNA, 19 bp, Homo sapiens
gtagtgccagtgtgactca

SEQ ID NO: 2394 - DNA, 19 bp, Homo sapiens
tagtgccagtgtgactcat

SEQ ID NO: 2395 - DNA, 19 bp, Homo sapiens
agtgccagtgtgactcatc

SEQ ID NO: 2396 - DNA, 19 bp, Homo sapiens
gtgccagtgtgactcatcc

SEQ ID NO: 2397 - DNA, 19 bp, Homo sapiens
tgccagtgtgactcatcca

SEQ ID NO: 2398 - DNA, 19 bp, Homo sapiens
gccagtgtgactcatccac

SEQ ID NO: 2399 - DNA, 19 bp, Homo sapiens
ccagtgtgactcatccaca

SEQ ID NO: 2400 - DNA, 19 bp, Homo sapiens
cagtgtgactcatccacaa

SEQ ID NO: 2401 - DNA, 19 bp, Homo sapiens
agtgtgactcatccacaat

SEQ ID NO: 2402 - DNA, 19 bp, Homo sapiens
gtgtgactcatccacaatg

SEQ ID NO: 2403 - DNA, 19 bp, Homo sapiens
tgtgactcatccacaatga

SEQ ID NO: 2404 - DNA, 19 bp, Homo sapiens
gtgactcatccacaatgat

SEQ ID NO: 2405 - DNA, 19 bp, Homo sapiens
tgactcatccacaatgatt

SEQ ID NO: 2406 - DNA, 19 bp, Homo sapiens
gactcatccacaatgattt

SEQ ID NO: 2407 - DNA, 19 bp, Homo sapiens
actcatccacaatgatttc

SEQ ID NO: 2408 - DNA, 19 bp, Homo sapiens
ctcatccacaatgatttct

SEQ ID NO: 2409 - DNA, 19 bp, Homo sapiens
tcatccacaatgatttctc

SEQ ID NO: 2410 - DNA, 19 bp, Homo sapiens
catccacaatgatttctcc

SEQ ID NO: 2411 - DNA, 19 bp, Homo sapiens
atccacaatgatttctcca

SEQ ID NO: 2412 - DNA, 19 bp, Homo sapiens
tccacaatgatttctccag

SEQ ID NO: 2413 - DNA, 19 bp, Homo sapiens
ccacaatgatttctccagt

SEQ ID NO: 2414 - DNA, 19 bp, Homo sapiens
cacaatgatttctccagtg

SEQ ID NO: 2415 - DNA, 19 bp, Homo sapiens
acaatgatttctccagtgc

SEQ ID NO: 2416 - DNA, 19 bp, Homo sapiens
caatgatttctccagtgct

SEQ ID NO: 2417 - DNA, 19 bp, Homo sapiens
aatgatttctccagtgctc

SEQ ID NO: 2418 - DNA, 19 bp, Homo sapiens
atgatttctccagtgctca

SEQ ID NO: 2419 - DNA, 19 bp, Homo sapiens
tgatttctccagtgctcat

SEQ ID NO: 2420 - DNA, 19 bp, Homo sapiens
gatttctccagtgctcatc

SEQ ID NO: 2421 - DNA, 19 bp, Homo sapiens
atttctccagtgctcatct

SEQ ID NO: 2422 - DNA, 19 bp, Homo sapiens
tttctccagtgctcatctt

SEQ ID NO: 2423 - DNA, 19 bp, Homo sapiens
ttctccagtgctcatcttg

SEQ ID NO: 2424 - DNA, 19 bp, Homo sapiens
tctccagtgctcatcttgt

SEQ ID NO: 2425 - DNA, 19 bp, Homo sapiens
ctccagtgctcatcttgtt

SEQ ID NO: 2426 - DNA, 19 bp, Homo sapiens
tccagtgctcatcttgttc

SEQ ID NO: 2427 - DNA, 19 bp, Homo sapiens
ccagtgctcatcttgttct

SEQ ID NO: 2428 - DNA, 19 bp, Homo sapiens
cagtgctcatcttgttctc

SEQ ID NO: 2429 - DNA, 19 bp, Homo sapiens
agtgctcatcttgttctcg

SEQ ID NO: 2430 - DNA, 19 bp, Homo sapiens
gtgctcatcttgttctcga

SEQ ID NO: 2431 - DNA, 19 bp, Homo sapiens
tgctcatcttgttctcgag

SEQ ID NO: 2432 - DNA, 19 bp, Homo sapiens
gctcatcttgttctcgagt

SEQ ID NO: 2433 - DNA, 19 bp, Homo sapiens
ctcatcttgttctcgagtt

SEQ ID NO: 2434 - DNA, 19 bp, Homo sapiens
tcatcttgttctcgagttt

SEQ ID NO: 2435 - DNA, 19 bp, Homo sapiens
catcttgttctcgagtttt

SEQ ID NO: 2436 - DNA, 19 bp, Homo sapiens
atcttgttctcgagttttc

SEQ ID NO: 2437 - DNA, 19 bp, Homo sapiens
tcttgttctcgagttttct

SEQ ID NO: 2438 - DNA, 19 bp, Homo sapiens
cttgttctcgagttttctc

SEQ ID NO: 2439 - DNA, 19 bp, Homo sapiens
ttgttctcgagttttctct

SEQ ID NO: 2440 - DNA, 19 bp, Homo sapiens
tgttctcgagttttctctg

SEQ ID NO: 2441 - DNA, 19 bp, Homo sapiens
gttctcgagttttctctgc

SEQ ID NO: 2442 - DNA, 19 bp, Homo sapiens
ttctcgagttttctctgcc

SEQ ID NO: 2443 - DNA, 19 bp, Homo sapiens
tctcgagttttctctgcca

SEQ ID NO: 2444 - DNA, 19 bp, Homo sapiens
ctcgagttttctctgccat

SEQ ID NO: 2445 - DNA, 19 bp, Homo sapiens
tcgagttttctctgccatg

SEQ ID NO: 2446 - DNA, 19 bp, Homo sapiens
cgagttttctctgccatgt

SEQ ID NO: 2447 - DNA, 19 bp, Homo sapiens
gagttttctctgccatgtt

SEQ ID NO: 2448 - DNA, 19 bp, Homo sapiens
agttttctctgccatgttg

SEQ ID NO: 2449 - DNA, 19 bp, Homo sapiens
gttttctctgccatgttgc

SEQ ID NO: 2450 - DNA, 19 bp, Homo sapiens
ttttctctgccatgttgct

SEQ ID NO: 2451 - DNA, 19 bp, Homo sapiens
tttctctgccatgttgcta

SEQ ID NO: 2452 - DNA, 19 bp, Homo sapiens
ttctctgccatgttgctat

SEQ ID NO: 2453 - DNA, 19 bp, Homo sapiens
tctctgccatgttgctatt

SEQ ID NO: 2454 - DNA, 19 bp, Homo sapiens
ctctgccatgttgctattg

SEQ ID NO: 2455 - DNA, 19 bp, Homo sapiens
tctgccatgttgctattgc

SEQ ID NO: 2456 - DNA, 19 bp, Homo sapiens
ctgccatgttgctattgca

SEQ ID NO: 2457 - DNA, 19 bp, Homo sapiens
tgccatgttgctattgcag

SEQ ID NO: 2458 - DNA, 19 bp, Homo sapiens
gccatgttgctattgcagg

SEQ ID NO: 2459 - DNA, 19 bp, Homo sapiens
ccatgttgctattgcagga

SEQ ID NO: 2460 - DNA, 19 bp, Homo sapiens
catgttgctattgcaggac

SEQ ID NO: 2461 - DNA, 19 bp, Homo sapiens
atgttgctattgcaggacg

SEQ ID NO: 2462 - DNA, 19 bp, Homo sapiens
tgttgctattgcaggacgg

SEQ ID NO: 2463 - DNA, 19 bp, Homo sapiens
gttgctattgcaggacgga

SEQ ID NO: 2464 - DNA, 19 bp, Homo sapiens
ttgctattgcaggacggac

SEQ ID NO: 2465 - DNA, 19 bp, Homo sapiens
tgctattgcaggacggacc

SEQ ID NO: 2466 - DNA, 19 bp, Homo sapiens
gctattgcaggacggacct

SEQ ID NO: 2467 - DNA, 19 bp, Homo sapiens
ctattgcaggacggacctg

SEQ ID NO: 2468 - DNA, 19 bp, Homo sapiens
tattgcaggacggacctgt

SEQ ID NO: 2469 - DNA, 19 bp, Homo sapiens
attgcaggacggacctgtc

SEQ ID NO: 2470 - DNA, 19 bp, Homo sapiens
ttgcaggacggacctgtcc

SEQ ID NO: 2471 - DNA, 19 bp, Homo sapiens
tgcaggacggacctgtccc

SEQ ID NO: 2472 - DNA, 19 bp, Homo sapiens
gcaggacggacctgtccca

SEQ ID NO: 2473 - DNA, 19 bp, Homo sapiens
caggacggacctgtcccaa

SEQ ID NO: 2474 - DNA, 19 bp, Homo sapiens
aggacggacctgtcccaag

SEQ ID NO: 2475 - DNA, 19 bp, Homo sapiens
ggacggacctgtcccaagc

SEQ ID NO: 2476 - DNA, 19 bp, Homo sapiens
gacggacctgtcccaagcc

SEQ ID NO: 2477 - DNA, 19 bp, Homo sapiens
acggacctgtcccaagcca

SEQ ID NO: 2478 - DNA, 19 bp, Homo sapiens
cggacctgtcccaagccag

SEQ ID NO: 2479 - DNA, 19 bp, Homo sapiens
ggacctgtcccaagccaga

SEQ ID NO: 2480 - DNA, 19 bp, Homo sapiens
gacctgtcccaagccagat

SEQ ID NO: 2481 - DNA, 19 bp, Homo sapiens
acctgtcccaagccagatg

SEQ ID NO: 2482 - DNA, 19 bp, Homo sapiens
cctgtcccaagccagatga

SEQ ID NO: 2483 - DNA, 19 bp, Homo sapiens
ctgtcccaagccagatgat

SEQ ID NO: 2484 - DNA, 19 bp, Homo sapiens
tgtcccaagccagatgatt

SEQ ID NO: 2485 - DNA, 19 bp, Homo sapiens
gtcccaagccagatgattt

SEQ ID NO: 2486 - DNA, 19 bp, Homo sapiens
tcccaagccagatgattta

SEQ ID NO: 2487 - DNA, 19 bp, Homo sapiens
cccaagccagatgatttac

SEQ ID NO: 2488 - DNA, 19 bp, Homo sapiens
ccaagccagatgatttacc

SEQ ID NO: 2489 - DNA, 19 bp, Homo sapiens
caagccagatgatttacca

SEQ ID NO: 2490 - DNA, 19 bp, Homo sapiens
aagccagatgatttaccat

SEQ ID NO: 2491 - DNA, 19 bp, Homo sapiens
agccagatgatttaccatt

SEQ ID NO: 2492 - DNA, 19 bp, Homo sapiens
gccagatgatttaccattt

SEQ ID NO: 2493 - DNA, 19 bp, Homo sapiens
ccagatgatttaccatttt

SEQ ID NO: 2494 - DNA, 19 bp, Homo sapiens
cagatgatttaccattttc

SEQ ID NO: 2495 - DNA, 19 bp, Homo sapiens
agatgatttaccattttcc

SEQ ID NO: 2496 - DNA, 19 bp, Homo sapiens
gatgatttaccattttcca

SEQ ID NO: 2497 - DNA, 19 bp, Homo sapiens
atgatttaccattttccac

SEQ ID NO: 2498 - DNA, 19 bp, Homo sapiens
tgatttaccattttccaca

SEQ ID NO: 2499 - DNA, 19 bp, Homo sapiens
gatttaccattttccacag

SEQ ID NO: 2500 - DNA, 19 bp, Homo sapiens
atttaccattttccacagt

SEQ ID NO: 2501 - DNA, 19 bp, Homo sapiens
tttaccattttccacagtg

SEQ ID NO: 2502 - DNA, 19 bp, Homo sapiens
ttaccattttccacagtgg

SEQ ID NO: 2503 - DNA, 19 bp, Homo sapiens
taccattttccacagtggt

SEQ ID NO: 2504 - DNA, 19 bp, Homo sapiens
accattttccacagtggtc

SEQ ID NO: 2505 - DNA, 19 bp, Homo sapiens
ccattttccacagtggtcc

SEQ ID NO: 2506 - DNA, 19 bp, Homo sapiens
cattttccacagtggtccc

SEQ ID NO: 2507 - DNA, 19 bp, Homo sapiens
attttccacagtggtcccg

SEQ ID NO: 2508 - DNA, 19 bp, Homo sapiens
ttttccacagtggtcccgt

SEQ ID NO: 2509 - DNA, 19 bp, Homo sapiens
tttccacagtggtcccgtt

SEQ ID NO: 2510 - DNA, 19 bp, Homo sapiens
ttccacagtggtcccgtta

SEQ ID NO: 2511 - DNA, 19 bp, Homo sapiens
tccacagtggtcccgttaa

SEQ ID NO: 2512 - DNA, 19 bp, Homo sapiens
ccacagtggtcccgttaaa

SEQ ID NO: 2513 - DNA, 19 bp, Homo sapiens
cacagtggtcccgttaaaa

SEQ ID NO: 2514 - DNA, 19 bp, Homo sapiens
acagtggtcccgttaaaaa

SEQ ID NO: 2515 - DNA, 19 bp, Homo sapiens
cagtggtcccgttaaaaac

SEQ ID NO: 2516 - DNA, 19 bp, Homo sapiens
agtggtcccgttaaaaaca

SEQ ID NO: 2517 - DNA, 19 bp, Homo sapiens
gtggtcccgttaaaaacat

SEQ ID NO: 2518 - DNA, 19 bp, Homo sapiens
tggtcccgttaaaaacatt

SEQ ID NO: 2519 - DNA, 19 bp, Homo sapiens
ggtcccgttaaaaacattc

SEQ ID NO: 2520 - DNA, 19 bp, Homo sapiens
gtcccgttaaaaacattct

SEQ ID NO: 2521 - DNA, 19 bp, Homo sapiens
tcccgttaaaaacattcta

SEQ ID NO: 2522 - DNA, 19 bp, Homo sapiens
cccgttaaaaacattctat

SEQ ID NO: 2523 - DNA, 19 bp, Homo sapiens
ccgttaaaaacattctatg

SEQ ID NO: 2524 - DNA, 19 bp, Homo sapiens
cgttaaaaacattctatga

SEQ ID NO: 2525 - DNA, 19 bp, Homo sapiens
gttaaaaacattctatgag

SEQ ID NO: 2526 - DNA, 19 bp, Homo sapiens
ttaaaaacattctatgagc

SEQ ID NO: 2527 - DNA, 19 bp, Homo sapiens
taaaaacattctatgagcc

SEQ ID NO: 2528 - DNA, 19 bp, Homo sapiens
aaaaacattctatgagcca

SEQ ID NO: 2529 - DNA, 19 bp, Homo sapiens
aaaacattctatgagccag

SEQ ID NO: 2530 - DNA, 19 bp, Homo sapiens
aaacattctatgagccagg

SEQ ID NO: 2531 - DNA, 19 bp, Homo sapiens
aacattctatgagccagga

SEQ ID NO: 2532 - DNA, 19 bp, Homo sapiens
acattctatgagccaggag

SEQ ID NO: 2533 - DNA, 19 bp, Homo sapiens
cattctatgagccaggaga

SEQ ID NO: 2534 - DNA, 19 bp, Homo sapiens
attctatgagccaggagaa

SEQ ID NO: 2535 - DNA, 19 bp, Homo sapiens
ttctatgagccaggagaag

SEQ ID NO: 2536 - DNA, 19 bp, Homo sapiens
tctatgagccaggagaaga

SEQ ID NO: 2537 - DNA, 19 bp, Homo sapiens
ctatgagccaggagaagag

SEQ ID NO: 2538 - DNA, 19 bp, Homo sapiens
tatgagccaggagaagaga

SEQ ID NO: 2539 - DNA, 19 bp, Homo sapiens
atgagccaggagaagagat

SEQ ID NO: 2540 - DNA, 19 bp, Homo sapiens
tgagccaggagaagagatt

SEQ ID NO: 2541 - DNA, 19 bp, Homo sapiens
gagccaggagaagagatta

SEQ ID NO: 2542 - DNA, 19 bp, Homo sapiens
agccaggagaagagattac

SEQ ID NO: 2543 - DNA, 19 bp, Homo sapiens
gccaggagaagagattacg

SEQ ID NO: 2544 - DNA, 19 bp, Homo sapiens
ccaggagaagagattacgt

SEQ ID NO: 2545 - DNA, 19 bp, Homo sapiens
caggagaagagattacgta

SEQ ID NO: 2546 - DNA, 19 bp, Homo sapiens
aggagaagagattacgtat

SEQ ID NO: 2547 - DNA, 19 bp, Homo sapiens
ggagaagagattacgtatt

SEQ ID NO: 2548 - DNA, 19 bp, Homo sapiens
gagaagagattacgtattc

SEQ ID NO: 2549 - DNA, 19 bp, Homo sapiens
agaagagattacgtattcc

SEQ ID NO: 2550 - DNA, 19 bp, Homo sapiens
gaagagattacgtattcct

SEQ ID NO: 2551 - DNA, 19 bp, Homo sapiens
aagagattacgtattcctg

SEQ ID NO: 2552 - DNA, 19 bp, Homo sapiens
agagattacgtattcctgc

SEQ ID NO: 2553 - DNA, 19 bp, Homo sapiens
gagattacgtattcctgca

SEQ ID NO: 2554 - DNA, 19 bp, Homo sapiens
agattacgtattcctgcaa

SEQ ID NO: 2555 - DNA, 19 bp, Homo sapiens
gattacgtattcctgcaag

SEQ ID NO: 2556 - DNA, 19 bp, Homo sapiens
attacgtattcctgcaagc

SEQ ID NO: 2557 - DNA, 19 bp, Homo sapiens
ttacgtattcctgcaagcc

SEQ ID NO: 2558 - DNA, 19 bp, Homo sapiens
tacgtattcctgcaagccg

SEQ ID NO: 2559 - DNA, 19 bp, Homo sapiens
acgtattcctgcaagccgg

SEQ ID NO: 2560 - DNA, 19 bp, Homo sapiens
cgtattcctgcaagccggg

SEQ ID NO: 2561 - DNA, 19 bp, Homo sapiens
gtattcctgcaagccgggc

SEQ ID NO: 2562 - DNA, 19 bp, Homo sapiens
tattcctgcaagccgggct

SEQ ID NO: 2563 - DNA, 19 bp, Homo sapiens
attcctgcaagccgggcta

SEQ ID NO: 2564 - DNA, 19 bp, Homo sapiens
ttcctgcaagccgggctat

SEQ ID NO: 2565 - DNA, 19 bp, Homo sapiens
tcctgcaagccgggctatg

SEQ ID NO: 2566 - DNA, 19 bp, Homo sapiens
cctgcaagccgggctatgt

SEQ ID NO: 2567 - DNA, 19 bp, Homo sapiens
ctgcaagccgggctatgtg

SEQ ID NO: 2568 - DNA, 19 bp, Homo sapiens
tgcaagccgggctatgtgt

SEQ ID NO: 2569 - DNA, 19 bp, Homo sapiens
gcaagccgggctatgtgtc

SEQ ID NO: 2570 - DNA, 19 bp, Homo sapiens
caagccgggctatgtgtcc

SEQ ID NO: 2571 - DNA, 19 bp, Homo sapiens
aagccgggctatgtgtccc

SEQ ID NO: 2572 - DNA, 19 bp, Homo sapiens
agccgggctatgtgtcccg

SEQ ID NO: 2573 - DNA, 19 bp, Homo sapiens
gccgggctatgtgtcccga

SEQ ID NO: 2574 - DNA, 19 bp, Homo sapiens
ccgggctatgtgtcccgag

SEQ ID NO: 2575 - DNA, 19 bp, Homo sapiens
cgggctatgtgtcccgagg

SEQ ID NO: 2576 - DNA, 19 bp, Homo sapiens
gggctatgtgtcccgagga

SEQ ID NO: 2577 - DNA, 19 bp, Homo sapiens
ggctatgtgtcccgaggag

SEQ ID NO: 2578 - DNA, 19 bp, Homo sapiens
gctatgtgtcccgaggagg

SEQ ID NO: 2579 - DNA, 19 bp, Homo sapiens
ctatgtgtcccgaggaggg

SEQ ID NO: 2580 - DNA, 19 bp, Homo sapiens
tatgtgtcccgaggaggga

SEQ ID NO: 2581 - DNA, 19 bp, Homo sapiens
atgtgtcccgaggagggat

SEQ ID NO: 2582 - DNA, 19 bp, Homo sapiens
tgtgtcccgaggagggatg

SEQ ID NO: 2583 - DNA, 19 bp, Homo sapiens
gtgtcccgaggagggatga

SEQ ID NO: 2584 - DNA, 19 bp, Homo sapiens
tgtcccgaggagggatgag

SEQ ID NO: 2585 - DNA, 19 bp, Homo sapiens
gtcccgaggagggatgaga

SEQ ID NO: 2586 - DNA, 19 bp, Homo sapiens
tcccgaggagggatgagaa

SEQ ID NO: 2587 - DNA, 19 bp, Homo sapiens
cccgaggagggatgagaaa

SEQ ID NO: 2588 - DNA, 19 bp, Homo sapiens
ccgaggagggatgagaaag

SEQ ID NO: 2589 - DNA, 19 bp, Homo sapiens
cgaggagggatgagaaagt

SEQ ID NO: 2590 - DNA, 19 bp, Homo sapiens
gaggagggatgagaaagtt

SEQ ID NO: 2591 - DNA, 19 bp, Homo sapiens
aggagggatgagaaagttt

SEQ ID NO: 2592 - DNA, 19 bp, Homo sapiens
ggagggatgagaaagttta

SEQ ID NO: 2593 - DNA, 19 bp, Homo sapiens
gagggatgagaaagtttat

SEQ ID NO: 2594 - DNA, 19 bp, Homo sapiens
agggatgagaaagtttatc

SEQ ID NO: 2595 - DNA, 19 bp, Homo sapiens
gggatgagaaagtttatct

SEQ ID NO: 2596 - DNA, 19 bp, Homo sapiens
ggatgagaaagtttatctg

SEQ ID NO: 2597 - DNA, 19 bp, Homo sapiens
gatgagaaagtttatctgc

SEQ ID NO: 2598 - DNA, 19 bp, Homo sapiens
atgagaaagtttatctgcc

SEQ ID NO: 2599 - DNA, 19 bp, Homo sapiens
tgagaaagtttatctgccc

SEQ ID NO: 2600 - DNA, 19 bp, Homo sapiens
gagaaagtttatctgccct

SEQ ID NO: 2601 - DNA, 19 bp, Homo sapiens
agaaagtttatctgccctc

SEQ ID NO: 2602 - DNA, 19 bp, Homo sapiens
gaaagtttatctgccctct

SEQ ID NO: 2603 - DNA, 19 bp, Homo sapiens
aaagtttatctgccctctc

SEQ ID NO: 2604 - DNA, 19 bp, Homo sapiens
aagtttatctgccctctca

SEQ ID NO: 2605 - DNA, 19 bp, Homo sapiens
agtttatctgccctctcac

SEQ ID NO: 2606 - DNA, 19 bp, Homo sapiens
gtttatctgccctctcaca

SEQ ID NO: 2607 - DNA, 19 bp, Homo sapiens
tttatctgccctctcacag

SEQ ID NO: 2608 - DNA, 19 bp, Homo sapiens
ttatctgccctctcacagg

SEQ ID NO: 2609 - DNA, 19 bp, Homo sapiens
tatctgccctctcacagga

SEQ ID NO: 2610 - DNA, 19 bp, Homo sapiens
atctgccctctcacaggac

SEQ ID NO: 2611 - DNA, 19 bp, Homo sapiens
tctgccctctcacaggact

SEQ ID NO: 2612 - DNA, 19 bp, Homo sapiens
ctgccctctcacaggactg

SEQ ID NO: 2613 - DNA, 19 bp, Homo sapiens
tgccctctcacaggactgt

SEQ ID NO: 2614 - DNA, 19 bp, Homo sapiens
gccctctcacaggactgtg

SEQ ID NO: 2615 - DNA, 19 bp, Homo sapiens
ccctctcacaggactgtgg

SEQ ID NO: 2616 - DNA, 19 bp, Homo sapiens
cctctcacaggactgtggc

SEQ ID NO: 2617 - DNA, 19 bp, Homo sapiens
ctctcacaggactgtggcc

SEQ ID NO: 2618 - DNA, 19 bp, Homo sapiens
tctcacaggactgtggccc

SEQ ID NO: 2619 - DNA, 19 bp, Homo sapiens
ctcacaggactgtggccca

SEQ ID NO: 2620 - DNA, 19 bp, Homo sapiens
tcacaggactgtggcccat

SEQ ID NO: 2621 - DNA, 19 bp, Homo sapiens
cacaggactgtggcccatc

SEQ ID NO: 2622 - DNA, 19 bp, Homo sapiens
acaggactgtggcccatca

SEQ ID NO: 2623 - DNA, 19 bp, Homo sapiens
caggactgtggcccatcaa

SEQ ID NO: 2624 - DNA, 19 bp, Homo sapiens
aggactgtggcccatcaac

SEQ ID NO: 2625 - DNA, 19 bp, Homo sapiens
ggactgtggcccatcaaca

SEQ ID NO: 2626 - DNA, 19 bp, Homo sapiens
gactgtggcccatcaacac

SEQ ID NO: 2627 - DNA, 19 bp, Homo sapiens
actgtggcccatcaacact

SEQ ID NO: 2628 - DNA, 19 bp, Homo sapiens
ctgtggcccatcaacactc

SEQ ID NO: 2629 - DNA, 19 bp, Homo sapiens
tgtggcccatcaacactct

SEQ ID NO: 2630 - DNA, 19 bp, Homo sapiens
gtggcccatcaacactctg

SEQ ID NO: 2631 - DNA, 19 bp, Homo sapiens
tggcccatcaacactctga

SEQ ID NO: 2632 - DNA, 19 bp, Homo sapiens
ggcccatcaacactctgaa

SEQ ID NO: 2633 - DNA, 19 bp, Homo sapiens
gcccatcaacactctgaaa

SEQ ID NO: 2634 - DNA, 19 bp, Homo sapiens
cccatcaacactctgaaat

SEQ ID NO: 2635 - DNA, 19 bp, Homo sapiens
ccatcaacactctgaaatg

SEQ ID NO: 2636 - DNA, 19 bp, Homo sapiens
catcaacactctgaaatgt

SEQ ID NO: 2637 - DNA, 19 bp, Homo sapiens
atcaacactctgaaatgta

SEQ ID NO: 2638 - DNA, 19 bp, Homo sapiens
tcaacactctgaaatgtac

SEQ ID NO: 2639 - DNA, 19 bp, Homo sapiens
caacactctgaaatgtaca

SEQ ID NO: 2640 - DNA, 19 bp, Homo sapiens
aacactctgaaatgtacac

SEQ ID NO: 2641 - DNA, 19 bp, Homo sapiens
acactctgaaatgtacacc

SEQ ID NO: 2642 - DNA, 19 bp, Homo sapiens
cactctgaaatgtacaccc

SEQ ID NO: 2643 - DNA, 19 bp, Homo sapiens
actctgaaatgtacaccca

SEQ ID NO: 2644 - DNA, 19 bp, Homo sapiens
ctctgaaatgtacacccag

SEQ ID NO: 2645 - DNA, 19 bp, Homo sapiens
tctgaaatgtacacccaga

SEQ ID NO: 2646 - DNA, 19 bp, Homo sapiens
ctgaaatgtacacccagag

SEQ ID NO: 2647 - DNA, 19 bp, Homo sapiens
tgaaatgtacacccagagt

SEQ ID NO: 2648 - DNA, 19 bp, Homo sapiens
gaaatgtacacccagagta

SEQ ID NO: 2649 - DNA, 19 bp, Homo sapiens
aaatgtacacccagagtat

SEQ ID NO: 2650 - DNA, 19 bp, Homo sapiens
aatgtacacccagagtatg

SEQ ID NO: 2651 - DNA, 19 bp, Homo sapiens
atgtacacccagagtatgt

SEQ ID NO: 2652 - DNA, 19 bp, Homo sapiens
tgtacacccagagtatgtc

SEQ ID NO: 2653 - DNA, 19 bp, Homo sapiens
gtacacccagagtatgtcc

SEQ ID NO: 2654 - DNA, 19 bp, Homo sapiens
tacacccagagtatgtcct

SEQ ID NO: 2655 - DNA, 19 bp, Homo sapiens
acacccagagtatgtcctt

SEQ ID NO: 2656 - DNA, 19 bp, Homo sapiens
cacccagagtatgtccttt

SEQ ID NO: 2657 - DNA, 19 bp, Homo sapiens
acccagagtatgtcctttt

SEQ ID NO: 2658 - DNA, 19 bp, Homo sapiens
cccagagtatgtccttttg

SEQ ID NO: 2659 - DNA, 19 bp, Homo sapiens
ccagagtatgtccttttgc

SEQ ID NO: 2660 - DNA, 19 bp, Homo sapiens
cagagtatgtccttttgct

SEQ ID NO: 2661 - DNA, 19 bp, Homo sapiens
agagtatgtccttttgctg

SEQ ID NO: 2662 - DNA, 19 bp, Homo sapiens
gagtatgtccttttgctgg

SEQ ID NO: 2663 - DNA, 19 bp, Homo sapiens
agtatgtccttttgctgga

SEQ ID NO: 2664 - DNA, 19 bp, Homo sapiens
gtatgtccttttgctggaa

SEQ ID NO: 2665 - DNA, 19 bp, Homo sapiens
tatgtccttttgctggaat

SEQ ID NO: 2666 - DNA, 19 bp, Homo sapiens
atgtccttttgctggaatc

SEQ ID NO: 2667 - DNA, 19 bp, Homo sapiens
tgtccttttgctggaatct

SEQ ID NO: 2668 - DNA, 19 bp, Homo sapiens
gtccttttgctggaatctt

SEQ ID NO: 2669 - DNA, 19 bp, Homo sapiens
tccttttgctggaatctta

SEQ ID NO: 2670 - DNA, 19 bp, Homo sapiens
ccttttgctggaatcttag

SEQ ID NO: 2671 - DNA, 19 bp, Homo sapiens
cttttgctggaatcttaga

SEQ ID NO: 2672 - DNA, 19 bp, Homo sapiens
ttttgctggaatcttagaa

SEQ ID NO: 2673 - DNA, 19 bp, Homo sapiens
tttgctggaatcttagaaa

SEQ ID NO: 2674 - DNA, 19 bp, Homo sapiens
ttgctggaatcttagaaaa

SEQ ID NO: 2675 - DNA, 19 bp, Homo sapiens
tgctggaatcttagaaaat

SEQ ID NO: 2676 - DNA, 19 bp, Homo sapiens
gctggaatcttagaaaatg

SEQ ID NO: 2677 - DNA, 19 bp, Homo sapiens
ctggaatcttagaaaatgg

SEQ ID NO: 2678 - DNA, 19 bp, Homo sapiens
tggaatcttagaaaatgga

SEQ ID NO: 2679 - DNA, 19 bp, Homo sapiens
ggaatcttagaaaatggag

SEQ ID NO: 2680 - DNA, 19 bp, Homo sapiens
gaatcttagaaaatggagc

SEQ ID NO: 2681 - DNA, 19 bp, Homo sapiens
aatcttagaaaatggagcc

SEQ ID NO: 2682 - DNA, 19 bp, Homo sapiens
atcttagaaaatggagccg

SEQ ID NO: 2683 - DNA, 19 bp, Homo sapiens
tcttagaaaatggagccgt

SEQ ID NO: 2684 - DNA, 19 bp, Homo sapiens
cttagaaaatggagccgta

SEQ ID NO: 2685 - DNA, 19 bp, Homo sapiens
ttagaaaatggagccgtac

SEQ ID NO: 2686 - DNA, 19 bp, Homo sapiens
tagaaaatggagccgtacg

SEQ ID NO: 2687 - DNA, 19 bp, Homo sapiens
agaaaatggagccgtacgc

SEQ ID NO: 2688 - DNA, 19 bp, Homo sapiens
gaaaatggagccgtacgct

SEQ ID NO: 2689 - DNA, 19 bp, Homo sapiens
aaaatggagccgtacgcta

SEQ ID NO: 2690 - DNA, 19 bp, Homo sapiens
aaatggagccgtacgctat

SEQ ID NO: 2691 - DNA, 19 bp, Homo sapiens
aatggagccgtacgctata

SEQ ID NO: 2692 - DNA, 19 bp, Homo sapiens
atggagccgtacgctatac

SEQ ID NO: 2693 - DNA, 19 bp, Homo sapiens
tggagccgtacgctatacg

SEQ ID NO: 2694 - DNA, 19 bp, Homo sapiens
ggagccgtacgctatacga

SEQ ID NO: 2695 - DNA, 19 bp, Homo sapiens
gagccgtacgctatacgac

SEQ ID NO: 2696 - DNA, 19 bp, Homo sapiens
agccgtacgctatacgact

SEQ ID NO: 2697 - DNA, 19 bp, Homo sapiens
gccgtacgctatacgactt

SEQ ID NO: 2698 - DNA, 19 bp, Homo sapiens
ccgtacgctatacgacttt

SEQ ID NO: 2699 - DNA, 19 bp, Homo sapiens
cgtacgctatacgactttt

SEQ ID NO: 2700 - DNA, 19 bp, Homo sapiens
gtacgctatacgacttttg

SEQ ID NO: 2701 - DNA, 19 bp, Homo sapiens
tacgctatacgacttttga

SEQ ID NO: 2702 - DNA, 19 bp, Homo sapiens
acgctatacgacttttgaa

SEQ ID NO: 2703 - DNA, 19 bp, Homo sapiens
cgctatacgacttttgaat

SEQ ID NO: 2704 - DNA, 19 bp, Homo sapiens
gctatacgacttttgaata

SEQ ID NO: 2705 - DNA, 19 bp, Homo sapiens
ctatacgacttttgaatat

SEQ ID NO: 2706 - DNA, 19 bp, Homo sapiens
tatacgacttttgaatatc

SEQ ID NO: 2707 - DNA, 19 bp, Homo sapiens
atacgacttttgaatatcc

SEQ ID NO: 2708 - DNA, 19 bp, Homo sapiens
tacgacttttgaatatccc

SEQ ID NO: 2709 - DNA, 19 bp, Homo sapiens
acgacttttgaatatccca

SEQ ID NO: 2710 - DNA, 19 bp, Homo sapiens
cgacttttgaatatcccaa

SEQ ID NO: 2711 - DNA, 19 bp, Homo sapiens
gacttttgaatatcccaac

SEQ ID NO: 2712 - DNA, 19 bp, Homo sapiens
acttttgaatatcccaaca

SEQ ID NO: 2713 - DNA, 19 bp, Homo sapiens
cttttgaatatcccaacac

SEQ ID NO: 2714 - DNA, 19 bp, Homo sapiens
ttttgaatatcccaacacg

SEQ ID NO: 2715 - DNA, 19 bp, Homo sapiens
tttgaatatcccaacacga

SEQ ID NO: 2716 - DNA, 19 bp, Homo sapiens
ttgaatatcccaacacgat

SEQ ID NO: 2717 - DNA, 19 bp, Homo sapiens
tgaatatcccaacacgatc

SEQ ID NO: 2718 - DNA, 19 bp, Homo sapiens
gaatatcccaacacgatca

SEQ ID NO: 2719 - DNA, 19 bp, Homo sapiens
aatatcccaacacgatcag

SEQ ID NO: 2720 - DNA, 19 bp, Homo sapiens
atatcccaacacgatcagt

SEQ ID NO: 2721 - DNA, 19 bp, Homo sapiens
tatcccaacacgatcagtt

SEQ ID NO: 2722 - DNA, 19 bp, Homo sapiens
atcccaacacgatcagttt

SEQ ID NO: 2723 - DNA, 19 bp, Homo sapiens
tcccaacacgatcagtttt

SEQ ID NO: 2724 - DNA, 19 bp, Homo sapiens
cccaacacgatcagttttt

SEQ ID NO: 2725 - DNA, 19 bp, Homo sapiens
ccaacacgatcagtttttc

SEQ ID NO: 2726 - DNA, 19 bp, Homo sapiens
caacacgatcagtttttct

SEQ ID NO: 2727 - DNA, 19 bp, Homo sapiens
aacacgatcagtttttctt

SEQ ID NO: 2728 - DNA, 19 bp, Homo sapiens
acacgatcagtttttcttg

SEQ ID NO: 2729 - DNA, 19 bp, Homo sapiens
cacgatcagtttttcttgt

SEQ ID NO: 2730 - DNA, 19 bp, Homo sapiens
acgatcagtttttcttgta

SEQ ID NO: 2731 - DNA, 19 bp, Homo sapiens
cgatcagtttttcttgtaa

SEQ ID NO: 2732 - DNA, 19 bp, Homo sapiens
gatcagtttttcttgtaac

SEQ ID NO: 2733 - DNA, 19 bp, Homo sapiens
atcagtttttcttgtaaca

SEQ ID NO: 2734 - DNA, 19 bp, Homo sapiens
tcagtttttcttgtaacac

SEQ ID NO: 2735 - DNA, 19 bp, Homo sapiens
cagtttttcttgtaacact

SEQ ID NO: 2736 - DNA, 19 bp, Homo sapiens
agtttttcttgtaacactg

SEQ ID NO: 2737 - DNA, 19 bp, Homo sapiens
gtttttcttgtaacactgg

SEQ ID NO: 2738 - DNA, 19 bp, Homo sapiens
tttttcttgtaacactggg

SEQ ID NO: 2739 - DNA, 19 bp, Homo sapiens
ttttcttgtaacactgggt

SEQ ID NO: 2740 - DNA, 19 bp, Homo sapiens
tttcttgtaacactgggtt

SEQ ID NO: 2741 - DNA, 19 bp, Homo sapiens
ttcttgtaacactgggttt

SEQ ID NO: 2742 - DNA, 19 bp, Homo sapiens
tcttgtaacactgggtttt

SEQ ID NO: 2743 - DNA, 19 bp, Homo sapiens
cttgtaacactgggtttta

SEQ ID NO: 2744 - DNA, 19 bp, Homo sapiens
ttgtaacactgggttttat

SEQ ID NO: 2745 - DNA, 19 bp, Homo sapiens
tgtaacactgggttttatc

SEQ ID NO: 2746 - DNA, 19 bp, Homo sapiens
gtaacactgggttttatct

SEQ ID NO: 2747 - DNA, 19 bp, Homo sapiens
taacactgggttttatctg

SEQ ID NO: 2748 - DNA, 19 bp, Homo sapiens
aacactgggttttatctga

SEQ ID NO: 2749 - DNA, 19 bp, Homo sapiens
acactgggttttatctgaa

SEQ ID NO: 2750 - DNA, 19 bp, Homo sapiens
cactgggttttatctgaat

SEQ ID NO: 2751 - DNA, 19 bp, Homo sapiens
actgggttttatctgaatg

SEQ ID NO: 2752 - DNA, 19 bp, Homo sapiens
ctgggttttatctgaatgg

SEQ ID NO: 2753 - DNA, 19 bp, Homo sapiens
tgggttttatctgaatggc

SEQ ID NO: 2754 - DNA, 19 bp, Homo sapiens
gggttttatctgaatggcg

SEQ ID NO: 2755 - DNA, 19 bp, Homo sapiens
ggttttatctgaatggcgc

SEQ ID NO: 2756 - DNA, 19 bp, Homo sapiens
gttttatctgaatggcgct

SEQ ID NO: 2757 - DNA, 19 bp, Homo sapiens
ttttatctgaatggcgctg

SEQ ID NO: 2758 - DNA, 19 bp, Homo sapiens
tttatctgaatggcgctga

SEQ ID NO: 2759 - DNA, 19 bp, Homo sapiens
ttatctgaatggcgctgat

SEQ ID NO: 2760 - DNA, 19 bp, Homo sapiens
tatctgaatggcgctgatt

SEQ ID NO: 2761 - DNA, 19 bp, Homo sapiens
atctgaatggcgctgattc

SEQ ID NO: 2762 - DNA, 19 bp, Homo sapiens
tctgaatggcgctgattct

SEQ ID NO: 2763 - DNA, 19 bp, Homo sapiens
ctgaatggcgctgattctg

SEQ ID NO: 2764 - DNA, 19 bp, Homo sapiens
tgaatggcgctgattctgc

SEQ ID NO: 2765 - DNA, 19 bp, Homo sapiens
gaatggcgctgattctgcc

SEQ ID NO: 2766 - DNA, 19 bp, Homo sapiens
aatggcgctgattctgcca

SEQ ID NO: 2767 - DNA, 19 bp, Homo sapiens
atggcgctgattctgccaa

SEQ ID NO: 2768 - DNA, 19 bp, Homo sapiens
tggcgctgattctgccaag

SEQ ID NO: 2769 - DNA, 19 bp, Homo sapiens
ggcgctgattctgccaagt

SEQ ID NO: 2770 - DNA, 19 bp, Homo sapiens
gcgctgattctgccaagtg

SEQ ID NO: 2771 - DNA, 19 bp, Homo sapiens
cgctgattctgccaagtgc

SEQ ID NO: 2772 - DNA, 19 bp, Homo sapiens
gctgattctgccaagtgca

SEQ ID NO: 2773 - DNA, 19 bp, Homo sapiens
ctgattctgccaagtgcac

SEQ ID NO: 2774 - DNA, 19 bp, Homo sapiens
tgattctgccaagtgcact

SEQ ID NO: 2775 - DNA, 19 bp, Homo sapiens
gattctgccaagtgcactg

SEQ ID NO: 2776 - DNA, 19 bp, Homo sapiens
attctgccaagtgcactga

SEQ ID NO: 2777 - DNA, 19 bp, Homo sapiens
ttctgccaagtgcactgag

SEQ ID NO: 2778 - DNA, 19 bp, Homo sapiens
tctgccaagtgcactgagg

SEQ ID NO: 2779 - DNA, 19 bp, Homo sapiens
ctgccaagtgcactgagga

SEQ ID NO: 2780 - DNA, 19 bp, Homo sapiens
tgccaagtgcactgaggaa

SEQ ID NO: 2781 - DNA, 19 bp, Homo sapiens
gccaagtgcactgaggaag

SEQ ID NO: 2782 - DNA, 19 bp, Homo sapiens
ccaagtgcactgaggaagg

SEQ ID NO: 2783 - DNA, 19 bp, Homo sapiens
caagtgcactgaggaagga

SEQ ID NO: 2784 - DNA, 19 bp, Homo sapiens
aagtgcactgaggaaggaa

SEQ ID NO: 2785 - DNA, 19 bp, Homo sapiens
agtgcactgaggaaggaaa

SEQ ID NO: 2786 - DNA, 19 bp, Homo sapiens
gtgcactgaggaaggaaaa

SEQ ID NO: 2787 - DNA, 19 bp, Homo sapiens
tgcactgaggaaggaaaat

SEQ ID NO: 2788 - DNA, 19 bp, Homo sapiens
gcactgaggaaggaaaatg

SEQ ID NO: 2789 - DNA, 19 bp, Homo sapiens
cactgaggaaggaaaatgg

SEQ ID NO: 2790 - DNA, 19 bp, Homo sapiens
actgaggaaggaaaatgga

SEQ ID NO: 2791 - DNA, 19 bp, Homo sapiens
ctgaggaaggaaaatggag

SEQ ID NO: 2792 - DNA, 19 bp, Homo sapiens
tgaggaaggaaaatggagc

SEQ ID NO: 2793 - DNA, 19 bp, Homo sapiens
gaggaaggaaaatggagcc

SEQ ID NO: 2794 - DNA, 19 bp, Homo sapiens
aggaaggaaaatggagccc

SEQ ID NO: 2795 - DNA, 19 bp, Homo sapiens
ggaaggaaaatggagcccg

SEQ ID NO: 2796 - DNA, 19 bp, Homo sapiens
gaaggaaaatggagcccgg

SEQ ID NO: 2797 - DNA, 19 bp, Homo sapiens
aaggaaaatggagcccgga

SEQ ID NO: 2798 - DNA, 19 bp, Homo sapiens
aggaaaatggagcccggag

SEQ ID NO: 2799 - DNA, 19 bp, Homo sapiens
ggaaaatggagcccggagc

SEQ ID NO: 2800 - DNA, 19 bp, Homo sapiens
gaaaatggagcccggagct

SEQ ID NO: 2801 - DNA, 19 bp, Homo sapiens
aaaatggagcccggagctt

SEQ ID NO: 2802 - DNA, 19 bp, Homo sapiens
aaatggagcccggagcttc

SEQ ID NO: 2803 - DNA, 19 bp, Homo sapiens
aatggagcccggagcttcc

SEQ ID NO: 2804 - DNA, 19 bp, Homo sapiens
atggagcccggagcttcct

SEQ ID NO: 2805 - DNA, 19 bp, Homo sapiens
tggagcccggagcttcctg

SEQ ID NO: 2806 - DNA, 19 bp, Homo sapiens
ggagcccggagcttcctgt

SEQ ID NO: 2807 - DNA, 19 bp, Homo sapiens
gagcccggagcttcctgtc

SEQ ID NO: 2808 - DNA, 19 bp, Homo sapiens
agcccggagcttcctgtct

SEQ ID NO: 2809 - DNA, 19 bp, Homo sapiens
gcccggagcttcctgtctg

SEQ ID NO: 2810 - DNA, 19 bp, Homo sapiens
cccggagcttcctgtctgt

SEQ ID NO: 2811 - DNA, 19 bp, Homo sapiens
ccggagcttcctgtctgtg

SEQ ID NO: 2812 - DNA, 19 bp, Homo sapiens
cggagcttcctgtctgtgc

SEQ ID NO: 2813 - DNA, 19 bp, Homo sapiens
ggagcttcctgtctgtgct

SEQ ID NO: 2814 - DNA, 19 bp, Homo sapiens
gagcttcctgtctgtgctc

SEQ ID NO: 2815 - DNA, 19 bp, Homo sapiens
agcttcctgtctgtgctcc

SEQ ID NO: 2816 - DNA, 19 bp, Homo sapiens
gcttcctgtctgtgctccc

SEQ ID NO: 2817 - DNA, 19 bp, Homo sapiens
cttcctgtctgtgctccca

SEQ ID NO: 2818 - DNA, 19 bp, Homo sapiens
ttcctgtctgtgctcccat

SEQ ID NO: 2819 - DNA, 19 bp, Homo sapiens
tcctgtctgtgctcccatc

SEQ ID NO: 2820 - DNA, 19 bp, Homo sapiens
cctgtctgtgctcccatca

SEQ ID NO: 2821 - DNA, 19 bp, Homo sapiens
ctgtctgtgctcccatcat

SEQ ID NO: 2822 - DNA, 19 bp, Homo sapiens
tgtctgtgctcccatcatc

SEQ ID NO: 2823 - DNA, 19 bp, Homo sapiens
gtctgtgctcccatcatct

SEQ ID NO: 2824 - DNA, 19 bp, Homo sapiens
tctgtgctcccatcatctg

SEQ ID NO: 2825 - DNA, 19 bp, Homo sapiens
ctgtgctcccatcatctgc

SEQ ID NO: 2826 - DNA, 19 bp, Homo sapiens
tgtgctcccatcatctgcc

SEQ ID NO: 2827 - DNA, 19 bp, Homo sapiens
gtgctcccatcatctgccc

SEQ ID NO: 2828 - DNA, 19 bp, Homo sapiens
tgctcccatcatctgccct

SEQ ID NO: 2829 - DNA, 19 bp, Homo sapiens
gctcccatcatctgccctc

SEQ ID NO: 2830 - DNA, 19 bp, Homo sapiens
ctcccatcatctgccctcc

SEQ ID NO: 2831 - DNA, 19 bp, Homo sapiens
tcccatcatctgccctcca

SEQ ID NO: 2832 - DNA, 19 bp, Homo sapiens
cccatcatctgccctccac

SEQ ID NO: 2833 - DNA, 19 bp, Homo sapiens
ccatcatctgccctccacc

SEQ ID NO: 2834 - DNA, 19 bp, Homo sapiens
catcatctgccctccacca

SEQ ID NO: 2835 - DNA, 19 bp, Homo sapiens
atcatctgccctccaccat

SEQ ID NO: 2836 - DNA, 19 bp, Homo sapiens
tcatctgccctccaccatc

SEQ ID NO: 2837 - DNA, 19 bp, Homo sapiens
catctgccctccaccatcc

SEQ ID NO: 2838 - DNA, 19 bp, Homo sapiens
atctgccctccaccatcca

SEQ ID NO: 2839 - DNA, 19 bp, Homo sapiens
tctgccctccaccatccat

SEQ ID NO: 2840 - DNA, 19 bp, Homo sapiens
ctgccctccaccatccata

SEQ ID NO: 2841 - DNA, 19 bp, Homo sapiens
tgccctccaccatccatac

SEQ ID NO: 2842 - DNA, 19 bp, Homo sapiens
gccctccaccatccatacc

SEQ ID NO: 2843 - DNA, 19 bp, Homo sapiens
ccctccaccatccatacct

SEQ ID NO: 2844 - DNA, 19 bp, Homo sapiens
cctccaccatccataccta

SEQ ID NO: 2845 - DNA, 19 bp, Homo sapiens
ctccaccatccatacctac

SEQ ID NO: 2846 - DNA, 19 bp, Homo sapiens
tccaccatccatacctacg

SEQ ID NO: 2847 - DNA, 19 bp, Homo sapiens
ccaccatccatacctacgt

SEQ ID NO: 2848 - DNA, 19 bp, Homo sapiens
caccatccatacctacgtt

SEQ ID NO: 2849 - DNA, 19 bp, Homo sapiens
accatccatacctacgttt

SEQ ID NO: 2850 - DNA, 19 bp, Homo sapiens
ccatccatacctacgtttg

SEQ ID NO: 2851 - DNA, 19 bp, Homo sapiens
catccatacctacgtttgc

SEQ ID NO: 2852 - DNA, 19 bp, Homo sapiens
atccatacctacgtttgca

SEQ ID NO: 2853 - DNA, 19 bp, Homo sapiens
tccatacctacgtttgcaa

SEQ ID NO: 2854 - DNA, 19 bp, Homo sapiens
ccatacctacgtttgcaac

SEQ ID NO: 2855 - DNA, 19 bp, Homo sapiens
catacctacgtttgcaaca

SEQ ID NO: 2856 - DNA, 19 bp, Homo sapiens
atacctacgtttgcaacac

SEQ ID NO: 2857 - DNA, 19 bp, Homo sapiens
tacctacgtttgcaacact

SEQ ID NO: 2858 - DNA, 19 bp, Homo sapiens
acctacgtttgcaacactt

SEQ ID NO: 2859 - DNA, 19 bp, Homo sapiens
cctacgtttgcaacacttc

SEQ ID NO: 2860 - DNA, 19 bp, Homo sapiens
ctacgtttgcaacacttcg

SEQ ID NO: 2861 - DNA, 19 bp, Homo sapiens
tacgtttgcaacacttcgt

SEQ ID NO: 2862 - DNA, 19 bp, Homo sapiens
acgtttgcaacacttcgtg

SEQ ID NO: 2863 - DNA, 19 bp, Homo sapiens
cgtttgcaacacttcgtgt

SEQ ID NO: 2864 - DNA, 19 bp, Homo sapiens
gtttgcaacacttcgtgtt

SEQ ID NO: 2865 - DNA, 19 bp, Homo sapiens
tttgcaacacttcgtgttt

SEQ ID NO: 2866 - DNA, 19 bp, Homo sapiens
ttgcaacacttcgtgttta

SEQ ID NO: 2867 - DNA, 19 bp, Homo sapiens
tgcaacacttcgtgtttat

SEQ ID NO: 2868 - DNA, 19 bp, Homo sapiens
gcaacacttcgtgtttata

SEQ ID NO: 2869 - DNA, 19 bp, Homo sapiens
caacacttcgtgtttataa

SEQ ID NO: 2870 - DNA, 19 bp, Homo sapiens
aacacttcgtgtttataag

SEQ ID NO: 2871 - DNA, 19 bp, Homo sapiens
acacttcgtgtttataagc

SEQ ID NO: 2872 - DNA, 19 bp, Homo sapiens
cacttcgtgtttataagcc

SEQ ID NO: 2873 - DNA, 19 bp, Homo sapiens
acttcgtgtttataagcca

SEQ ID NO: 2874 - DNA, 19 bp, Homo sapiens
cttcgtgtttataagccat

SEQ ID NO: 2875 - DNA, 19 bp, Homo sapiens
ttcgtgtttataagccatc

SEQ ID NO: 2876 - DNA, 19 bp, Homo sapiens
tcgtgtttataagccatca

SEQ ID NO: 2877 - DNA, 19 bp, Homo sapiens
cgtgtttataagccatcag

SEQ ID NO: 2878 - DNA, 19 bp, Homo sapiens
gtgtttataagccatcagc

SEQ ID NO: 2879 - DNA, 19 bp, Homo sapiens
tgtttataagccatcagct

SEQ ID NO: 2880 - DNA, 19 bp, Homo sapiens
gtttataagccatcagctg

SEQ ID NO: 2881 - DNA, 19 bp, Homo sapiens
tttataagccatcagctgg

SEQ ID NO: 2882 - DNA, 19 bp, Homo sapiens
ttataagccatcagctgga

SEQ ID NO: 2883 - DNA, 19 bp, Homo sapiens
tataagccatcagctggaa

SEQ ID NO: 2884 - DNA, 19 bp, Homo sapiens
ataagccatcagctggaaa

SEQ ID NO: 2885 - DNA, 19 bp, Homo sapiens
taagccatcagctggaaac

SEQ ID NO: 2886 - DNA, 19 bp, Homo sapiens
aagccatcagctggaaaca

SEQ ID NO: 2887 - DNA, 19 bp, Homo sapiens
agccatcagctggaaacaa

SEQ ID NO: 2888 - DNA, 19 bp, Homo sapiens
gccatcagctggaaacaat

SEQ ID NO: 2889 - DNA, 19 bp, Homo sapiens
ccatcagctggaaacaatt

SEQ ID NO: 2890 - DNA, 19 bp, Homo sapiens
catcagctggaaacaattc

SEQ ID NO: 2891 - DNA, 19 bp, Homo sapiens
atcagctggaaacaattcc

SEQ ID NO: 2892 - DNA, 19 bp, Homo sapiens
tcagctggaaacaattccc

SEQ ID NO: 2893 - DNA, 19 bp, Homo sapiens
cagctggaaacaattccct

SEQ ID NO: 2894 - DNA, 19 bp, Homo sapiens
agctggaaacaattccctc

SEQ ID NO: 2895 - DNA, 19 bp, Homo sapiens
gctggaaacaattccctct

SEQ ID NO: 2896 - DNA, 19 bp, Homo sapiens
ctggaaacaattccctcta

SEQ ID NO: 2897 - DNA, 19 bp, Homo sapiens
tggaaacaattccctctat

SEQ ID NO: 2898 - DNA, 19 bp, Homo sapiens
ggaaacaattccctctatc

SEQ ID NO: 2899 - DNA, 19 bp, Homo sapiens
gaaacaattccctctatcg

SEQ ID NO: 2900 - DNA, 19 bp, Homo sapiens
aaacaattccctctatcgg

SEQ ID NO: 2901 - DNA, 19 bp, Homo sapiens
aacaattccctctatcggg

SEQ ID NO: 2902 - DNA, 19 bp, Homo sapiens
acaattccctctatcggga

SEQ ID NO: 2903 - DNA, 19 bp, Homo sapiens
caattccctctatcgggac

SEQ ID NO: 2904 - DNA, 19 bp, Homo sapiens
aattccctctatcgggaca

SEQ ID NO: 2905 - DNA, 19 bp, Homo sapiens
attccctctatcgggacac

SEQ ID NO: 2906 - DNA, 19 bp, Homo sapiens
ttccctctatcgggacaca

SEQ ID NO: 2907 - DNA, 19 bp, Homo sapiens
tccctctatcgggacacag

SEQ ID NO: 2908 - DNA, 19 bp, Homo sapiens
ccctctatcgggacacagc

SEQ ID NO: 2909 - DNA, 19 bp, Homo sapiens
cctctatcgggacacagca

SEQ ID NO: 2910 - DNA, 19 bp, Homo sapiens
ctctatcgggacacagcag

SEQ ID NO: 2911 - DNA, 19 bp, Homo sapiens
tctatcgggacacagcagt

SEQ ID NO: 2912 - DNA, 19 bp, Homo sapiens
ctatcgggacacagcagtt

SEQ ID NO: 2913 - DNA, 19 bp, Homo sapiens
tatcgggacacagcagttt

SEQ ID NO: 2914 - DNA, 19 bp, Homo sapiens
atcgggacacagcagtttt

SEQ ID NO: 2915 - DNA, 19 bp, Homo sapiens
tcgggacacagcagttttt

SEQ ID NO: 2916 - DNA, 19 bp, Homo sapiens
cgggacacagcagtttttg

SEQ ID NO: 2917 - DNA, 19 bp, Homo sapiens
gggacacagcagtttttga

SEQ ID NO: 2918 - DNA, 19 bp, Homo sapiens
ggacacagcagtttttgaa

SEQ ID NO: 2919 - DNA, 19 bp, Homo sapiens
gacacagcagtttttgaat

SEQ ID NO: 2920 - DNA, 19 bp, Homo sapiens
acacagcagtttttgaatg

SEQ ID NO: 2921 - DNA, 19 bp, Homo sapiens
cacagcagtttttgaatgt

SEQ ID NO: 2922 - DNA, 19 bp, Homo sapiens
acagcagtttttgaatgtt

SEQ ID NO: 2923 - DNA, 19 bp, Homo sapiens
cagcagtttttgaatgttt

SEQ ID NO: 2924 - DNA, 19 bp, Homo sapiens
agcagtttttgaatgtttg

SEQ ID NO: 2925 - DNA, 19 bp, Homo sapiens
gcagtttttgaatgtttgc

SEQ ID NO: 2926 - DNA, 19 bp, Homo sapiens
cagtttttgaatgtttgcc

SEQ ID NO: 2927 - DNA, 19 bp, Homo sapiens
agtttttgaatgtttgcca

SEQ ID NO: 2928 - DNA, 19 bp, Homo sapiens
gtttttgaatgtttgccac

SEQ ID NO: 2929 - DNA, 19 bp, Homo sapiens
tttttgaatgtttgccaca

SEQ ID NO: 2930 - DNA, 19 bp, Homo sapiens
ttttgaatgtttgccacaa

SEQ ID NO: 2931 - DNA, 19 bp, Homo sapiens
tttgaatgtttgccacaac

SEQ ID NO: 2932 - DNA, 19 bp, Homo sapiens
ttgaatgtttgccacaaca

SEQ ID NO: 2933 - DNA, 19 bp, Homo sapiens
tgaatgtttgccacaacat

SEQ ID NO: 2934 - DNA, 19 bp, Homo sapiens
gaatgtttgccacaacatg

SEQ ID NO: 2935 - DNA, 19 bp, Homo sapiens
aatgtttgccacaacatgc

SEQ ID NO: 2936 - DNA, 19 bp, Homo sapiens
atgtttgccacaacatgcg

SEQ ID NO: 2937 - DNA, 19 bp, Homo sapiens
tgtttgccacaacatgcga

SEQ ID NO: 2938 - DNA, 19 bp, Homo sapiens
gtttgccacaacatgcgat

SEQ ID NO: 2939 - DNA, 19 bp, Homo sapiens
tttgccacaacatgcgatg

SEQ ID NO: 2940 - DNA, 19 bp, Homo sapiens
ttgccacaacatgcgatgt

SEQ ID NO: 2941 - DNA, 19 bp, Homo sapiens
tgccacaacatgcgatgtt

SEQ ID NO: 2942 - DNA, 19 bp, Homo sapiens
gccacaacatgcgatgttt

SEQ ID NO: 2943 - DNA, 19 bp, Homo sapiens
ccacaacatgcgatgtttg

SEQ ID NO: 2944 - DNA, 19 bp, Homo sapiens
cacaacatgcgatgtttgg

SEQ ID NO: 2945 - DNA, 19 bp, Homo sapiens
acaacatgcgatgtttgga

SEQ ID NO: 2946 - DNA, 19 bp, Homo sapiens
caacatgcgatgtttggaa

SEQ ID NO: 2947 - DNA, 19 bp, Homo sapiens
aacatgcgatgtttggaaa

SEQ ID NO: 2948 - DNA, 19 bp, Homo sapiens
acatgcgatgtttggaaat

SEQ ID NO: 2949 - DNA, 19 bp, Homo sapiens
catgcgatgtttggaaatg

SEQ ID NO: 2950 - DNA, 19 bp, Homo sapiens
atgcgatgtttggaaatga

SEQ ID NO: 2951 - DNA, 19 bp, Homo sapiens
tgcgatgtttggaaatgat

SEQ ID NO: 2952 - DNA, 19 bp, Homo sapiens
gcgatgtttggaaatgata

SEQ ID NO: 2953 - DNA, 19 bp, Homo sapiens
cgatgtttggaaatgatac

SEQ ID NO: 2954 - DNA, 19 bp, Homo sapiens
gatgtttggaaatgataca

SEQ ID NO: 2955 - DNA, 19 bp, Homo sapiens
atgtttggaaatgatacaa

SEQ ID NO: 2956 - DNA, 19 bp, Homo sapiens
tgtttggaaatgatacaat

SEQ ID NO: 2957 - DNA, 19 bp, Homo sapiens
gtttggaaatgatacaatt

SEQ ID NO: 2958 - DNA, 19 bp, Homo sapiens
tttggaaatgatacaatta

SEQ ID NO: 2959 - DNA, 19 bp, Homo sapiens
ttggaaatgatacaattac

SEQ ID NO: 2960 - DNA, 19 bp, Homo sapiens
tggaaatgatacaattacc

SEQ ID NO: 2961 - DNA, 19 bp, Homo sapiens
ggaaatgatacaattacct

SEQ ID NO: 2962 - DNA, 19 bp, Homo sapiens
gaaatgatacaattacctg

SEQ ID NO: 2963 - DNA, 19 bp, Homo sapiens
aaatgatacaattacctgc

SEQ ID NO: 2964 - DNA, 19 bp, Homo sapiens
aatgatacaattacctgca

SEQ ID NO: 2965 - DNA, 19 bp, Homo sapiens
atgatacaattacctgcac

SEQ ID NO: 2966 - DNA, 19 bp, Homo sapiens
tgatacaattacctgcacg

SEQ ID NO: 2967 - DNA, 19 bp, Homo sapiens
gatacaattacctgcacga

SEQ ID NO: 2968 - DNA, 19 bp, Homo sapiens
atacaattacctgcacgac

SEQ ID NO: 2969 - DNA, 19 bp, Homo sapiens
tacaattacctgcacgaca

SEQ ID NO: 2970 - DNA, 19 bp, Homo sapiens
acaattacctgcacgacac

SEQ ID NO: 2971 - DNA, 19 bp, Homo sapiens
caattacctgcacgacaca

SEQ ID NO: 2972 - DNA, 19 bp, Homo sapiens
aattacctgcacgacacat

SEQ ID NO: 2973 - DNA, 19 bp, Homo sapiens
attacctgcacgacacatg

SEQ ID NO: 2974 - DNA, 19 bp, Homo sapiens
ttacctgcacgacacatgg

SEQ ID NO: 2975 - DNA, 19 bp, Homo sapiens
tacctgcacgacacatgga

SEQ ID NO: 2976 - DNA, 19 bp, Homo sapiens
acctgcacgacacatggaa

SEQ ID NO: 2977 - DNA, 19 bp, Homo sapiens
cctgcacgacacatggaaa

SEQ ID NO: 2978 - DNA, 19 bp, Homo sapiens
ctgcacgacacatggaaat

SEQ ID NO: 2979 - DNA, 19 bp, Homo sapiens
tgcacgacacatggaaatt

SEQ ID NO: 2980 - DNA, 19 bp, Homo sapiens
gcacgacacatggaaattg

SEQ ID NO: 2981 - DNA, 19 bp, Homo sapiens
cacgacacatggaaattgg

SEQ ID NO: 2982 - DNA, 19 bp, Homo sapiens
acgacacatggaaattgga

SEQ ID NO: 2983 - DNA, 19 bp, Homo sapiens
cgacacatggaaattggac

SEQ ID NO: 2984 - DNA, 19 bp, Homo sapiens
gacacatggaaattggact

SEQ ID NO: 2985 - DNA, 19 bp, Homo sapiens
acacatggaaattggacta

SEQ ID NO: 2986 - DNA, 19 bp, Homo sapiens
cacatggaaattggactaa

SEQ ID NO: 2987 - DNA, 19 bp, Homo sapiens
acatggaaattggactaaa

SEQ ID NO: 2988 - DNA, 19 bp, Homo sapiens
catggaaattggactaaat

SEQ ID NO: 2989 - DNA, 19 bp, Homo sapiens
atggaaattggactaaatt

SEQ ID NO: 2990 - DNA, 19 bp, Homo sapiens
tggaaattggactaaatta

SEQ ID NO: 2991 - DNA, 19 bp, Homo sapiens
ggaaattggactaaattac

SEQ ID NO: 2992 - DNA, 19 bp, Homo sapiens
gaaattggactaaattacc

SEQ ID NO: 2993 - DNA, 19 bp, Homo sapiens
aaattggactaaattacca

SEQ ID NO: 2994 - DNA, 19 bp, Homo sapiens
aattggactaaattaccag

SEQ ID NO: 2995 - DNA, 19 bp, Homo sapiens
attggactaaattaccaga

SEQ ID NO: 2996 - DNA, 19 bp, Homo sapiens
ttggactaaattaccagaa

SEQ ID NO: 2997 - DNA, 19 bp, Homo sapiens
tggactaaattaccagaat

SEQ ID NO: 2998 - DNA, 19 bp, Homo sapiens
ggactaaattaccagaatg

SEQ ID NO: 2999 - DNA, 19 bp, Homo sapiens
gactaaattaccagaatgc

SEQ ID NO: 3000 - DNA, 19 bp, Homo sapiens
actaaattaccagaatgca

SEQ ID NO: 3001 - DNA, 19 bp, Homo sapiens
ctaaattaccagaatgcag

SEQ ID NO: 3002 - DNA, 19 bp, Homo sapiens
taaattaccagaatgcagg

SEQ ID NO: 3003 - DNA, 19 bp, Homo sapiens
aaattaccagaatgcaggg

SEQ ID NO: 3004 - DNA, 19 bp, Homo sapiens
aattaccagaatgcaggga

SEQ ID NO: 3005 - DNA, 19 bp, Homo sapiens
attaccagaatgcagggaa

SEQ ID NO: 3006 - DNA, 19 bp, Homo sapiens
ttaccagaatgcagggaag

SEQ ID NO: 3007 - DNA, 19 bp, Homo sapiens
taccagaatgcagggaagt

SEQ ID NO: 3008 - DNA, 19 bp, Homo sapiens
accagaatgcagggaagta

SEQ ID NO: 3009 - DNA, 19 bp, Homo sapiens
ccagaatgcagggaagtaa

SEQ ID NO: 3010 - DNA, 19 bp, Homo sapiens
cagaatgcagggaagtaaa

SEQ ID NO: 3011 - DNA, 19 bp, Homo sapiens
agaatgcagggaagtaaaa

SEQ ID NO: 3012 - DNA, 19 bp, Homo sapiens
gaatgcagggaagtaaaat

SEQ ID NO: 3013 - DNA, 19 bp, Homo sapiens
aatgcagggaagtaaaatg

SEQ ID NO: 3014 - DNA, 19 bp, Homo sapiens
atgcagggaagtaaaatgc

SEQ ID NO: 3015 - DNA, 19 bp, Homo sapiens
tgcagggaagtaaaatgcc

SEQ ID NO: 3016 - DNA, 19 bp, Homo sapiens
gcagggaagtaaaatgccc

SEQ ID NO: 3017 - DNA, 19 bp, Homo sapiens
cagggaagtaaaatgccca

SEQ ID NO: 3018 - DNA, 19 bp, Homo sapiens
agggaagtaaaatgcccat

SEQ ID NO: 3019 - DNA, 19 bp, Homo sapiens
gggaagtaaaatgcccatt

SEQ ID NO: 3020 - DNA, 19 bp, Homo sapiens
ggaagtaaaatgcccattc

SEQ ID NO: 3021 - DNA, 19 bp, Homo sapiens
gaagtaaaatgcccattcc

SEQ ID NO: 3022 - DNA, 19 bp, Homo sapiens
aagtaaaatgcccattccc

SEQ ID NO: 3023 - DNA, 19 bp, Homo sapiens
agtaaaatgcccattccca

SEQ ID NO: 3024 - DNA, 19 bp, Homo sapiens
gtaaaatgcccattcccat

SEQ ID NO: 3025 - DNA, 19 bp, Homo sapiens
taaaatgcccattcccatc

SEQ ID NO: 3026 - DNA, 19 bp, Homo sapiens
aaaatgcccattcccatca

SEQ ID NO: 3027 - DNA, 19 bp, Homo sapiens
aaatgcccattcccatcaa

SEQ ID NO: 3028 - DNA, 19 bp, Homo sapiens
aatgcccattcccatcaag

SEQ ID NO: 3029 - DNA, 19 bp, Homo sapiens
atgcccattcccatcaaga

SEQ ID NO: 3030 - DNA, 19 bp, Homo sapiens
tgcccattcccatcaagac

SEQ ID NO: 3031 - DNA, 19 bp, Homo sapiens
gcccattcccatcaagacc

SEQ ID NO: 3032 - DNA, 19 bp, Homo sapiens
cccattcccatcaagacca

SEQ ID NO: 3033 - DNA, 19 bp, Homo sapiens
ccattcccatcaagaccag

SEQ ID NO: 3034 - DNA, 19 bp, Homo sapiens
cattcccatcaagaccaga

SEQ ID NO: 3035 - DNA, 19 bp, Homo sapiens
attcccatcaagaccagac

SEQ ID NO: 3036 - DNA, 19 bp, Homo sapiens
ttcccatcaagaccagaca

SEQ ID NO: 3037 - DNA, 19 bp, Homo sapiens
tcccatcaagaccagacaa

SEQ ID NO: 3038 - DNA, 19 bp, Homo sapiens
cccatcaagaccagacaat

SEQ ID NO: 3039 - DNA, 19 bp, Homo sapiens
ccatcaagaccagacaatg

SEQ ID NO: 3040 - DNA, 19 bp, Homo sapiens
catcaagaccagacaatgg

SEQ ID NO: 3041 - DNA, 19 bp, Homo sapiens
atcaagaccagacaatgga

SEQ ID NO: 3042 - DNA, 19 bp, Homo sapiens
tcaagaccagacaatggat

SEQ ID NO: 3043 - DNA, 19 bp, Homo sapiens
caagaccagacaatggatt

SEQ ID NO: 3044 - DNA, 19 bp, Homo sapiens
aagaccagacaatggattt

SEQ ID NO: 3045 - DNA, 19 bp, Homo sapiens
agaccagacaatggatttg

SEQ ID NO: 3046 - DNA, 19 bp, Homo sapiens
gaccagacaatggatttgt

SEQ ID NO: 3047 - DNA, 19 bp, Homo sapiens
accagacaatggatttgtg

SEQ ID NO: 3048 - DNA, 19 bp, Homo sapiens
ccagacaatggatttgtga

SEQ ID NO: 3049 - DNA, 19 bp, Homo sapiens
cagacaatggatttgtgaa

SEQ ID NO: 3050 - DNA, 19 bp, Homo sapiens
agacaatggatttgtgaac

SEQ ID NO: 3051 - DNA, 19 bp, Homo sapiens
gacaatggatttgtgaact

SEQ ID NO: 3052 - DNA, 19 bp, Homo sapiens
acaatggatttgtgaacta

SEQ ID NO: 3053 - DNA, 19 bp, Homo sapiens
caatggatttgtgaactat

SEQ ID NO: 3054 - DNA, 19 bp, Homo sapiens
aatggatttgtgaactatc

SEQ ID NO: 3055 - DNA, 19 bp, Homo sapiens
atggatttgtgaactatcc

SEQ ID NO: 3056 - DNA, 19 bp, Homo sapiens
tggatttgtgaactatcct

SEQ ID NO: 3057 - DNA, 19 bp, Homo sapiens
ggatttgtgaactatcctg

SEQ ID NO: 3058 - DNA, 19 bp, Homo sapiens
gatttgtgaactatcctgc

SEQ ID NO: 3059 - DNA, 19 bp, Homo sapiens
atttgtgaactatcctgca

SEQ ID NO: 3060 - DNA, 19 bp, Homo sapiens
tttgtgaactatcctgcaa

SEQ ID NO: 3061 - DNA, 19 bp, Homo sapiens
ttgtgaactatcctgcaaa

SEQ ID NO: 3062 - DNA, 19 bp, Homo sapiens
tgtgaactatcctgcaaaa

SEQ ID NO: 3063 - DNA, 19 bp, Homo sapiens
gtgaactatcctgcaaaac

SEQ ID NO: 3064 - DNA, 19 bp, Homo sapiens
tgaactatcctgcaaaacc

SEQ ID NO: 3065 - DNA, 19 bp, Homo sapiens
gaactatcctgcaaaacca

SEQ ID NO: 3066 - DNA, 19 bp, Homo sapiens
aactatcctgcaaaaccaa

SEQ ID NO: 3067 - DNA, 19 bp, Homo sapiens
actatcctgcaaaaccaac

SEQ ID NO: 3068 - DNA, 19 bp, Homo sapiens
ctatcctgcaaaaccaaca

SEQ ID NO: 3069 - DNA, 19 bp, Homo sapiens
tatcctgcaaaaccaacac

SEQ ID NO: 3070 - DNA, 19 bp, Homo sapiens
atcctgcaaaaccaacact

SEQ ID NO: 3071 - DNA, 19 bp, Homo sapiens
tcctgcaaaaccaacactt

SEQ ID NO: 3072 - DNA, 19 bp, Homo sapiens
cctgcaaaaccaacacttt

SEQ ID NO: 3073 - DNA, 19 bp, Homo sapiens
ctgcaaaaccaacacttta

SEQ ID NO: 3074 - DNA, 19 bp, Homo sapiens
tgcaaaaccaacactttat

SEQ ID NO: 3075 - DNA, 19 bp, Homo sapiens
gcaaaaccaacactttatt

SEQ ID NO: 3076 - DNA, 19 bp, Homo sapiens
caaaaccaacactttatta

SEQ ID NO: 3077 - DNA, 19 bp, Homo sapiens
aaaaccaacactttattac

SEQ ID NO: 3078 - DNA, 19 bp, Homo sapiens
aaaccaacactttattaca

SEQ ID NO: 3079 - DNA, 19 bp, Homo sapiens
aaccaacactttattacaa

SEQ ID NO: 3080 - DNA, 19 bp, Homo sapiens
accaacactttattacaag

SEQ ID NO: 3081 - DNA, 19 bp, Homo sapiens
ccaacactttattacaagg

SEQ ID NO: 3082 - DNA, 19 bp, Homo sapiens
caacactttattacaagga

SEQ ID NO: 3083 - DNA, 19 bp, Homo sapiens
aacactttattacaaggat

SEQ ID NO: 3084 - DNA, 19 bp, Homo sapiens
acactttattacaaggata

SEQ ID NO: 3085 - DNA, 19 bp, Homo sapiens
cactttattacaaggataa

SEQ ID NO: 3086 - DNA, 19 bp, Homo sapiens
actttattacaaggataaa

SEQ ID NO: 3087 - DNA, 19 bp, Homo sapiens
ctttattacaaggataaag

SEQ ID NO: 3088 - DNA, 19 bp, Homo sapiens
tttattacaaggataaagc

SEQ ID NO: 3089 - DNA, 19 bp, Homo sapiens
ttattacaaggataaagcc

SEQ ID NO: 3090 - DNA, 19 bp, Homo sapiens
tattacaaggataaagcca

SEQ ID NO: 3091 - DNA, 19 bp, Homo sapiens
attacaaggataaagccac

SEQ ID NO: 3092 - DNA, 19 bp, Homo sapiens
ttacaaggataaagccaca

SEQ ID NO: 3093 - DNA, 19 bp, Homo sapiens
tacaaggataaagccacat

SEQ ID NO: 3094 - DNA, 19 bp, Homo sapiens
acaaggataaagccacatt

SEQ ID NO: 3095 - DNA, 19 bp, Homo sapiens
caaggataaagccacattt

SEQ ID NO: 3096 - DNA, 19 bp, Homo sapiens
aaggataaagccacatttg

SEQ ID NO: 3097 - DNA, 19 bp, Homo sapiens
aggataaagccacatttgg

SEQ ID NO: 3098 - DNA, 19 bp, Homo sapiens
ggataaagccacatttggc

SEQ ID NO: 3099 - DNA, 19 bp, Homo sapiens
gataaagccacatttggct

SEQ ID NO: 3100 - DNA, 19 bp, Homo sapiens
ataaagccacatttggctg

SEQ ID NO: 3101 - DNA, 19 bp, Homo sapiens
taaagccacatttggctgc

SEQ ID NO: 3102 - DNA, 19 bp, Homo sapiens
aaagccacatttggctgcc

SEQ ID NO: 3103 - DNA, 19 bp, Homo sapiens
aagccacatttggctgcca

SEQ ID NO: 3104 - DNA, 19 bp, Homo sapiens
agccacatttggctgccat

SEQ ID NO: 3105 - DNA, 19 bp, Homo sapiens
gccacatttggctgccatg

SEQ ID NO: 3106 - DNA, 19 bp, Homo sapiens
ccacatttggctgccatga

SEQ ID NO: 3107 - DNA, 19 bp, Homo sapiens
cacatttggctgccatgat

SEQ ID NO: 3108 - DNA, 19 bp, Homo sapiens
acatttggctgccatgatg

SEQ ID NO: 3109 - DNA, 19 bp, Homo sapiens
catttggctgccatgatgg

SEQ ID NO: 3110 - DNA, 19 bp, Homo sapiens
atttggctgccatgatgga

SEQ ID NO: 3111 - DNA, 19 bp, Homo sapiens
tttggctgccatgatggat

SEQ ID NO: 3112 - DNA, 19 bp, Homo sapiens
ttggctgccatgatggata

SEQ ID NO: 3113 - DNA, 19 bp, Homo sapiens
tggctgccatgatggatat

SEQ ID NO: 3114 - DNA, 19 bp, Homo sapiens
ggctgccatgatggatatt

SEQ ID NO: 3115 - DNA, 19 bp, Homo sapiens
gctgccatgatggatattc

SEQ ID NO: 3116 - DNA, 19 bp, Homo sapiens
ctgccatgatggatattct

SEQ ID NO: 3117 - DNA, 19 bp, Homo sapiens
tgccatgatggatattctc

SEQ ID NO: 3118 - DNA, 19 bp, Homo sapiens
gccatgatggatattctct

SEQ ID NO: 3119 - DNA, 19 bp, Homo sapiens
ccatgatggatattctctg

SEQ ID NO: 3120 - DNA, 19 bp, Homo sapiens
catgatggatattctctgg

SEQ ID NO: 3121 - DNA, 19 bp, Homo sapiens
atgatggatattctctgga

SEQ ID NO: 3122 - DNA, 19 bp, Homo sapiens
tgatggatattctctggat

SEQ ID NO: 3123 - DNA, 19 bp, Homo sapiens
gatggatattctctggatg

SEQ ID NO: 3124 - DNA, 19 bp, Homo sapiens
atggatattctctggatgg

SEQ ID NO: 3125 - DNA, 19 bp, Homo sapiens
tggatattctctggatggc

SEQ ID NO: 3126 - DNA, 19 bp, Homo sapiens
ggatattctctggatggcc

SEQ ID NO: 3127 - DNA, 19 bp, Homo sapiens
gatattctctggatggccc

SEQ ID NO: 3128 - DNA, 19 bp, Homo sapiens
atattctctggatggcccg

SEQ ID NO: 3129 - DNA, 19 bp, Homo sapiens
tattctctggatggcccgg

SEQ ID NO: 3130 - DNA, 19 bp, Homo sapiens
attctctggatggcccgga

SEQ ID NO: 3131 - DNA, 19 bp, Homo sapiens
ttctctggatggcccggaa

SEQ ID NO: 3132 - DNA, 19 bp, Homo sapiens
tctctggatggcccggaag

SEQ ID NO: 3133 - DNA, 19 bp, Homo sapiens
ctctggatggcccggaaga

SEQ ID NO: 3134 - DNA, 19 bp, Homo sapiens
tctggatggcccggaagaa

SEQ ID NO: 3135 - DNA, 19 bp, Homo sapiens
ctggatggcccggaagaaa

SEQ ID NO: 3136 - DNA, 19 bp, Homo sapiens
tggatggcccggaagaaat

SEQ ID NO: 3137 - DNA, 19 bp, Homo sapiens
ggatggcccggaagaaata

SEQ ID NO: 3138 - DNA, 19 bp, Homo sapiens
gatggcccggaagaaatag

SEQ ID NO: 3139 - DNA, 19 bp, Homo sapiens
atggcccggaagaaataga

SEQ ID NO: 3140 - DNA, 19 bp, Homo sapiens
tggcccggaagaaatagaa

SEQ ID NO: 3141 - DNA, 19 bp, Homo sapiens
ggcccggaagaaatagaat

SEQ ID NO: 3142 - DNA, 19 bp, Homo sapiens
gcccggaagaaatagaatg

SEQ ID NO: 3143 - DNA, 19 bp, Homo sapiens
cccggaagaaatagaatgt

SEQ ID NO: 3144 - DNA, 19 bp, Homo sapiens
ccggaagaaatagaatgta

SEQ ID NO: 3145 - DNA, 19 bp, Homo sapiens
cggaagaaatagaatgtac

SEQ ID NO: 3146 - DNA, 19 bp, Homo sapiens
ggaagaaatagaatgtacc

SEQ ID NO: 3147 - DNA, 19 bp, Homo sapiens
gaagaaatagaatgtacca

SEQ ID NO: 3148 - DNA, 19 bp, Homo sapiens
aagaaatagaatgtaccaa

SEQ ID NO: 3149 - DNA, 19 bp, Homo sapiens
agaaatagaatgtaccaaa

SEQ ID NO: 3150 - DNA, 19 bp, Homo sapiens
gaaatagaatgtaccaaac

SEQ ID NO: 3151 - DNA, 19 bp, Homo sapiens
aaatagaatgtaccaaact

SEQ ID NO: 3152 - DNA, 19 bp, Homo sapiens
aatagaatgtaccaaactg

SEQ ID NO: 3153 - DNA, 19 bp, Homo sapiens
atagaatgtaccaaactgg

SEQ ID NO: 3154 - DNA, 19 bp, Homo sapiens
tagaatgtaccaaactggg

SEQ ID NO: 3155 - DNA, 19 bp, Homo sapiens
agaatgtaccaaactggga

SEQ ID NO: 3156 - DNA, 19 bp, Homo sapiens
gaatgtaccaaactgggaa

SEQ ID NO: 3157 - DNA, 19 bp, Homo sapiens
aatgtaccaaactgggaaa

SEQ ID NO: 3158 - DNA, 19 bp, Homo sapiens
atgtaccaaactgggaaac

SEQ ID NO: 3159 - DNA, 19 bp, Homo sapiens
tgtaccaaactgggaaact

SEQ ID NO: 3160 - DNA, 19 bp, Homo sapiens
gtaccaaactgggaaactg

SEQ ID NO: 3161 - DNA, 19 bp, Homo sapiens
taccaaactgggaaactgg

SEQ ID NO: 3162 - DNA, 19 bp, Homo sapiens
accaaactgggaaactggt

SEQ ID NO: 3163 - DNA, 19 bp, Homo sapiens
ccaaactgggaaactggtc

SEQ ID NO: 3164 - DNA, 19 bp, Homo sapiens
caaactgggaaactggtct

SEQ ID NO: 3165 - DNA, 19 bp, Homo sapiens
aaactgggaaactggtctg

SEQ ID NO: 3166 - DNA, 19 bp, Homo sapiens
aactgggaaactggtctgc

SEQ ID NO: 3167 - DNA, 19 bp, Homo sapiens
actgggaaactggtctgcc

SEQ ID NO: 3168 - DNA, 19 bp, Homo sapiens
ctgggaaactggtctgcca

SEQ ID NO: 3169 - DNA, 19 bp, Homo sapiens
tgggaaactggtctgccat

SEQ ID NO: 3170 - DNA, 19 bp, Homo sapiens
gggaaactggtctgccatg

SEQ ID NO: 3171 - DNA, 19 bp, Homo sapiens
ggaaactggtctgccatgc

SEQ ID NO: 3172 - DNA, 19 bp, Homo sapiens
gaaactggtctgccatgcc

SEQ ID NO: 3173 - DNA, 19 bp, Homo sapiens
aaactggtctgccatgcca

SEQ ID NO: 3174 - DNA, 19 bp, Homo sapiens
aactggtctgccatgccaa

SEQ ID NO: 3175 - DNA, 19 bp, Homo sapiens
actggtctgccatgccaag

SEQ ID NO: 3176 - DNA, 19 bp, Homo sapiens
ctggtctgccatgccaagt

SEQ ID NO: 3177 - DNA, 19 bp, Homo sapiens
tggtctgccatgccaagtt

SEQ ID NO: 3178 - DNA, 19 bp, Homo sapiens
ggtctgccatgccaagttg

SEQ ID NO: 3179 - DNA, 19 bp, Homo sapiens
gtctgccatgccaagttgt

SEQ ID NO: 3180 - DNA, 19 bp, Homo sapiens
tctgccatgccaagttgta

SEQ ID NO: 3181 - DNA, 19 bp, Homo sapiens
ctgccatgccaagttgtaa

SEQ ID NO: 3182 - DNA, 19 bp, Homo sapiens
tgccatgccaagttgtaaa

SEQ ID NO: 3183 - DNA, 19 bp, Homo sapiens
gccatgccaagttgtaaag

SEQ ID NO: 3184 - DNA, 19 bp, Homo sapiens
ccatgccaagttgtaaagc

SEQ ID NO: 3185 - DNA, 19 bp, Homo sapiens
catgccaagttgtaaagca

SEQ ID NO: 3186 - DNA, 19 bp, Homo sapiens
atgccaagttgtaaagcat

SEQ ID NO: 3187 - DNA, 19 bp, Homo sapiens
tgccaagttgtaaagcatc

SEQ ID NO: 3188 - DNA, 19 bp, Homo sapiens
gccaagttgtaaagcatct

SEQ ID NO: 3189 - DNA, 19 bp, Homo sapiens
ccaagttgtaaagcatctt

SEQ ID NO: 3190 - DNA, 19 bp, Homo sapiens
caagttgtaaagcatcttg

SEQ ID NO: 3191 - DNA, 19 bp, Homo sapiens
aagttgtaaagcatcttgt

SEQ ID NO: 3192 - DNA, 19 bp, Homo sapiens
agttgtaaagcatcttgta

SEQ ID NO: 3193 - DNA, 19 bp, Homo sapiens
gttgtaaagcatcttgtaa

SEQ ID NO: 3194 - DNA, 19 bp, Homo sapiens
ttgtaaagcatcttgtaaa

SEQ ID NO: 3195 - DNA, 19 bp, Homo sapiens
tgtaaagcatcttgtaaag

SEQ ID NO: 3196 - DNA, 19 bp, Homo sapiens
gtaaagcatcttgtaaagt

SEQ ID NO: 3197 - DNA, 19 bp, Homo sapiens
taaagcatcttgtaaagta

SEQ ID NO: 3198 - DNA, 19 bp, Homo sapiens
aaagcatcttgtaaagtac

SEQ ID NO: 3199 - DNA, 19 bp, Homo sapiens
aagcatcttgtaaagtacc

SEQ ID NO: 3200 - DNA, 19 bp, Homo sapiens
agcatcttgtaaagtacct

SEQ ID NO: 3201 - DNA, 19 bp, Homo sapiens
gcatcttgtaaagtacctg

SEQ ID NO: 3202 - DNA, 19 bp, Homo sapiens
catcttgtaaagtacctgt

SEQ ID NO: 3203 - DNA, 19 bp, Homo sapiens
atcttgtaaagtacctgtg

SEQ ID NO: 3204 - DNA, 19 bp, Homo sapiens
tcttgtaaagtacctgtga

SEQ ID NO: 3205 - DNA, 19 bp, Homo sapiens
cttgtaaagtacctgtgaa

SEQ ID NO: 3206 - DNA, 19 bp, Homo sapiens
ttgtaaagtacctgtgaaa

SEQ ID NO: 3207 - DNA, 19 bp, Homo sapiens
tgtaaagtacctgtgaaaa

SEQ ID NO: 3208 - DNA, 19 bp, Homo sapiens
gtaaagtacctgtgaaaaa

SEQ ID NO: 3209 - DNA, 19 bp, Homo sapiens
taaagtacctgtgaaaaaa

SEQ ID NO: 3210 - DNA, 19 bp, Homo sapiens
aaagtacctgtgaaaaaag

SEQ ID NO: 3211 - DNA, 19 bp, Homo sapiens
aagtacctgtgaaaaaagc

SEQ ID NO: 3212 - DNA, 19 bp, Homo sapiens
agtacctgtgaaaaaagcc

SEQ ID NO: 3213 - DNA, 19 bp, Homo sapiens
gtacctgtgaaaaaagcca

SEQ ID NO: 3214 - DNA, 19 bp, Homo sapiens
tacctgtgaaaaaagccac

SEQ ID NO: 3215 - DNA, 19 bp, Homo sapiens
acctgtgaaaaaagccact

SEQ ID NO: 3216 - DNA, 19 bp, Homo sapiens
cctgtgaaaaaagccactg

SEQ ID NO: 3217 - DNA, 19 bp, Homo sapiens
ctgtgaaaaaagccactgt

SEQ ID NO: 3218 - DNA, 19 bp, Homo sapiens
tgtgaaaaaagccactgtg

SEQ ID NO: 3219 - DNA, 19 bp, Homo sapiens
gtgaaaaaagccactgtgg

SEQ ID NO: 3220 - DNA, 19 bp, Homo sapiens
tgaaaaaagccactgtggt

SEQ ID NO: 3221 - DNA, 19 bp, Homo sapiens
gaaaaaagccactgtggtg

SEQ ID NO: 3222 - DNA, 19 bp, Homo sapiens
aaaaaagccactgtggtgt

SEQ ID NO: 3223 - DNA, 19 bp, Homo sapiens
aaaaagccactgtggtgta

SEQ ID NO: 3224 - DNA, 19 bp, Homo sapiens
aaaagccactgtggtgtac

SEQ ID NO: 3225 - DNA, 19 bp, Homo sapiens
aaagccactgtggtgtacc

SEQ ID NO: 3226 - DNA, 19 bp, Homo sapiens
aagccactgtggtgtacca

SEQ ID NO: 3227 - DNA, 19 bp, Homo sapiens
agccactgtggtgtaccaa

SEQ ID NO: 3228 - DNA, 19 bp, Homo sapiens
gccactgtggtgtaccaag

SEQ ID NO: 3229 - DNA, 19 bp, Homo sapiens
ccactgtggtgtaccaagg

SEQ ID NO: 3230 - DNA, 19 bp, Homo sapiens
cactgtggtgtaccaagga

SEQ ID NO: 3231 - DNA, 19 bp, Homo sapiens
actgtggtgtaccaaggag

SEQ ID NO: 3232 - DNA, 19 bp, Homo sapiens
ctgtggtgtaccaaggaga

SEQ ID NO: 3233 - DNA, 19 bp, Homo sapiens
tgtggtgtaccaaggagag

SEQ ID NO: 3234 - DNA, 19 bp, Homo sapiens
gtggtgtaccaaggagaga

SEQ ID NO: 3235 - DNA, 19 bp, Homo sapiens
tggtgtaccaaggagagag

SEQ ID NO: 3236 - DNA, 19 bp, Homo sapiens
ggtgtaccaaggagagaga

SEQ ID NO: 3237 - DNA, 19 bp, Homo sapiens
gtgtaccaaggagagagag

SEQ ID NO: 3238 - DNA, 19 bp, Homo sapiens
tgtaccaaggagagagagt

SEQ ID NO: 3239 - DNA, 19 bp, Homo sapiens
gtaccaaggagagagagta

SEQ ID NO: 3240 - DNA, 19 bp, Homo sapiens
taccaaggagagagagtaa

SEQ ID NO: 3241 - DNA, 19 bp, Homo sapiens
accaaggagagagagtaaa

SEQ ID NO: 3242 - DNA, 19 bp, Homo sapiens
ccaaggagagagagtaaag

SEQ ID NO: 3243 - DNA, 19 bp, Homo sapiens
caaggagagagagtaaaga

SEQ ID NO: 3244 - DNA, 19 bp, Homo sapiens
aaggagagagagtaaagat

SEQ ID NO: 3245 - DNA, 19 bp, Homo sapiens
aggagagagagtaaagatt

SEQ ID NO: 3246 - DNA, 19 bp, Homo sapiens
ggagagagagtaaagattc

SEQ ID NO: 3247 - DNA, 19 bp, Homo sapiens
gagagagagtaaagattca

SEQ ID NO: 3248 - DNA, 19 bp, Homo sapiens
agagagagtaaagattcag

SEQ ID NO: 3249 - DNA, 19 bp, Homo sapiens
gagagagtaaagattcagg

SEQ ID NO: 3250 - DNA, 19 bp, Homo sapiens
agagagtaaagattcagga

SEQ ID NO: 3251 - DNA, 19 bp, Homo sapiens
gagagtaaagattcaggaa

SEQ ID NO: 3252 - DNA, 19 bp, Homo sapiens
agagtaaagattcaggaaa

SEQ ID NO: 3253 - DNA, 19 bp, Homo sapiens
gagtaaagattcaggaaaa

SEQ ID NO: 3254 - DNA, 19 bp, Homo sapiens
agtaaagattcaggaaaaa

SEQ ID NO: 3255 - DNA, 19 bp, Homo sapiens
gtaaagattcaggaaaaat

SEQ ID NO: 3256 - DNA, 19 bp, Homo sapiens
taaagattcaggaaaaatt

SEQ ID NO: 3257 - DNA, 19 bp, Homo sapiens
aaagattcaggaaaaattt

SEQ ID NO: 3258 - DNA, 19 bp, Homo sapiens
aagattcaggaaaaattta

SEQ ID NO: 3259 - DNA, 19 bp, Homo sapiens
agattcaggaaaaatttaa

SEQ ID NO: 3260 - DNA, 19 bp, Homo sapiens
gattcaggaaaaatttaag

SEQ ID NO: 3261 - DNA, 19 bp, Homo sapiens
attcaggaaaaatttaaga

SEQ ID NO: 3262 - DNA, 19 bp, Homo sapiens
ttcaggaaaaatttaagaa

SEQ ID NO: 3263 - DNA, 19 bp, Homo sapiens
tcaggaaaaatttaagaat

SEQ ID NO: 3264 - DNA, 19 bp, Homo sapiens
caggaaaaatttaagaatg

SEQ ID NO: 3265 - DNA, 19 bp, Homo sapiens
aggaaaaatttaagaatgg

SEQ ID NO: 3266 - DNA, 19 bp, Homo sapiens
ggaaaaatttaagaatgga

SEQ ID NO: 3267 - DNA, 19 bp, Homo sapiens
gaaaaatttaagaatggaa

SEQ ID NO: 3268 - DNA, 19 bp, Homo sapiens
aaaaatttaagaatggaat

SEQ ID NO: 3269 - DNA, 19 bp, Homo sapiens
aaaatttaagaatggaatg

SEQ ID NO: 3270 - DNA, 19 bp, Homo sapiens
aaatttaagaatggaatgc

SEQ ID NO: 3271 - DNA, 19 bp, Homo sapiens
aatttaagaatggaatgct

SEQ ID NO: 3272 - DNA, 19 bp, Homo sapiens
atttaagaatggaatgcta

SEQ ID NO: 3273 - DNA, 19 bp, Homo sapiens
tttaagaatggaatgctac

SEQ ID NO: 3274 - DNA, 19 bp, Homo sapiens
ttaagaatggaatgctaca

SEQ ID NO: 3275 - DNA, 19 bp, Homo sapiens
taagaatggaatgctacat

SEQ ID NO: 3276 - DNA, 19 bp, Homo sapiens
aagaatggaatgctacatg

SEQ ID NO: 3277 - DNA, 19 bp, Homo sapiens
agaatggaatgctacatgg

SEQ ID NO: 3278 - DNA, 19 bp, Homo sapiens
gaatggaatgctacatggt

SEQ ID NO: 3279 - DNA, 19 bp, Homo sapiens
aatggaatgctacatggtg

SEQ ID NO: 3280 - DNA, 19 bp, Homo sapiens
atggaatgctacatggtga

SEQ ID NO: 3281 - DNA, 19 bp, Homo sapiens
tggaatgctacatggtgat

SEQ ID NO: 3282 - DNA, 19 bp, Homo sapiens
ggaatgctacatggtgata

SEQ ID NO: 3283 - DNA, 19 bp, Homo sapiens
gaatgctacatggtgataa

SEQ ID NO: 3284 - DNA, 19 bp, Homo sapiens
aatgctacatggtgataaa

SEQ ID NO: 3285 - DNA, 19 bp, Homo sapiens
atgctacatggtgataaag

SEQ ID NO: 3286 - DNA, 19 bp, Homo sapiens
tgctacatggtgataaagt

SEQ ID NO: 3287 - DNA, 19 bp, Homo sapiens
gctacatggtgataaagtt

SEQ ID NO: 3288 - DNA, 19 bp, Homo sapiens
ctacatggtgataaagttt

SEQ ID NO: 3289 - DNA, 19 bp, Homo sapiens
tacatggtgataaagtttc

SEQ ID NO: 3290 - DNA, 19 bp, Homo sapiens
acatggtgataaagtttct

SEQ ID NO: 3291 - DNA, 19 bp, Homo sapiens
catggtgataaagtttctt

SEQ ID NO: 3292 - DNA, 19 bp, Homo sapiens
atggtgataaagtttcttt

SEQ ID NO: 3293 - DNA, 19 bp, Homo sapiens
tggtgataaagtttctttc

SEQ ID NO: 3294 - DNA, 19 bp, Homo sapiens
ggtgataaagtttctttct

SEQ ID NO: 3295 - DNA, 19 bp, Homo sapiens
gtgataaagtttctttctt

SEQ ID NO: 3296 - DNA, 19 bp, Homo sapiens
tgataaagtttctttcttc

SEQ ID NO: 3297 - DNA, 19 bp, Homo sapiens
gataaagtttctttcttct

SEQ ID NO: 3298 - DNA, 19 bp, Homo sapiens
ataaagtttctttcttctg

SEQ ID NO: 3299 - DNA, 19 bp, Homo sapiens
taaagtttctttcttctgc

SEQ ID NO: 3300 - DNA, 19 bp, Homo sapiens
aaagtttctttcttctgca

SEQ ID NO: 3301 - DNA, 19 bp, Homo sapiens
aagtttctttcttctgcaa

SEQ ID NO: 3302 - DNA, 19 bp, Homo sapiens
agtttctttcttctgcaaa

SEQ ID NO: 3303 - DNA, 19 bp, Homo sapiens
gtttctttcttctgcaaaa

SEQ ID NO: 3304 - DNA, 19 bp, Homo sapiens
tttctttcttctgcaaaaa

SEQ ID NO: 3305 - DNA, 19 bp, Homo sapiens
ttctttcttctgcaaaaat

SEQ ID NO: 3306 - DNA, 19 bp, Homo sapiens
tctttcttctgcaaaaata

SEQ ID NO: 3307 - DNA, 19 bp, Homo sapiens
ctttcttctgcaaaaataa

SEQ ID NO: 3308 - DNA, 19 bp, Homo sapiens
tttcttctgcaaaaataag

SEQ ID NO: 3309 - DNA, 19 bp, Homo sapiens
ttcttctgcaaaaataagg

SEQ ID NO: 3310 - DNA, 19 bp, Homo sapiens
tcttctgcaaaaataagga

SEQ ID NO: 3311 - DNA, 19 bp, Homo sapiens
cttctgcaaaaataaggaa

SEQ ID NO: 3312 - DNA, 19 bp, Homo sapiens
ttctgcaaaaataaggaaa

SEQ ID NO: 3313 - DNA, 19 bp, Homo sapiens
tctgcaaaaataaggaaaa

SEQ ID NO: 3314 - DNA, 19 bp, Homo sapiens
ctgcaaaaataaggaaaag

SEQ ID NO: 3315 - DNA, 19 bp, Homo sapiens
tgcaaaaataaggaaaaga

SEQ ID NO: 3316 - DNA, 19 bp, Homo sapiens
gcaaaaataaggaaaagaa

SEQ ID NO: 3317 - DNA, 19 bp, Homo sapiens
caaaaataaggaaaagaag

SEQ ID NO: 3318 - DNA, 19 bp, Homo sapiens
aaaaataaggaaaagaagt

SEQ ID NO: 3319 - DNA, 19 bp, Homo sapiens
aaaataaggaaaagaagtg

SEQ ID NO: 3320 - DNA, 19 bp, Homo sapiens
aaataaggaaaagaagtgt

SEQ ID NO: 3321 - DNA, 19 bp, Homo sapiens
aataaggaaaagaagtgta

SEQ ID NO: 3322 - DNA, 19 bp, Homo sapiens
ataaggaaaagaagtgtag

SEQ ID NO: 3323 - DNA, 19 bp, Homo sapiens
taaggaaaagaagtgtagc

SEQ ID NO: 3324 - DNA, 19 bp, Homo sapiens
aaggaaaagaagtgtagct

SEQ ID NO: 3325 - DNA, 19 bp, Homo sapiens
aggaaaagaagtgtagcta

SEQ ID NO: 3326 - DNA, 19 bp, Homo sapiens
ggaaaagaagtgtagctat

SEQ ID NO: 3327 - DNA, 19 bp, Homo sapiens
gaaaagaagtgtagctata

SEQ ID NO: 3328 - DNA, 19 bp, Homo sapiens
aaaagaagtgtagctatac

SEQ ID NO: 3329 - DNA, 19 bp, Homo sapiens
aaagaagtgtagctataca

SEQ ID NO: 3330 - DNA, 19 bp, Homo sapiens
aagaagtgtagctatacag

SEQ ID NO: 3331 - DNA, 19 bp, Homo sapiens
agaagtgtagctatacaga

SEQ ID NO: 3332 - DNA, 19 bp, Homo sapiens
gaagtgtagctatacagag

SEQ ID NO: 3333 - DNA, 19 bp, Homo sapiens
aagtgtagctatacagagg

SEQ ID NO: 3334 - DNA, 19 bp, Homo sapiens
agtgtagctatacagagga

SEQ ID NO: 3335 - DNA, 19 bp, Homo sapiens
gtgtagctatacagaggat

SEQ ID NO: 3336 - DNA, 19 bp, Homo sapiens
tgtagctatacagaggatg

SEQ ID NO: 3337 - DNA, 19 bp, Homo sapiens
gtagctatacagaggatgc

SEQ ID NO: 3338 - DNA, 19 bp, Homo sapiens
tagctatacagaggatgct

SEQ ID NO: 3339 - DNA, 19 bp, Homo sapiens
agctatacagaggatgctc

SEQ ID NO: 3340 - DNA, 19 bp, Homo sapiens
gctatacagaggatgctca

SEQ ID NO: 3341 - DNA, 19 bp, Homo sapiens
ctatacagaggatgctcag

SEQ ID NO: 3342 - DNA, 19 bp, Homo sapiens
tatacagaggatgctcagt

SEQ ID NO: 3343 - DNA, 19 bp, Homo sapiens
atacagaggatgctcagtg

SEQ ID NO: 3344 - DNA, 19 bp, Homo sapiens
tacagaggatgctcagtgt

SEQ ID NO: 3345 - DNA, 19 bp, Homo sapiens
acagaggatgctcagtgta

SEQ ID NO: 3346 - DNA, 19 bp, Homo sapiens
cagaggatgctcagtgtat

SEQ ID NO: 3347 - DNA, 19 bp, Homo sapiens
agaggatgctcagtgtata

SEQ ID NO: 3348 - DNA, 19 bp, Homo sapiens
gaggatgctcagtgtatag

SEQ ID NO: 3349 - DNA, 19 bp, Homo sapiens
aggatgctcagtgtataga

SEQ ID NO: 3350 - DNA, 19 bp, Homo sapiens
ggatgctcagtgtatagat

SEQ ID NO: 3351 - DNA, 19 bp, Homo sapiens
gatgctcagtgtatagatg

SEQ ID NO: 3352 - DNA, 19 bp, Homo sapiens
atgctcagtgtatagatgg

SEQ ID NO: 3353 - DNA, 19 bp, Homo sapiens
tgctcagtgtatagatggc

SEQ ID NO: 3354 - DNA, 19 bp, Homo sapiens
gctcagtgtatagatggca

SEQ ID NO: 3355 - DNA, 19 bp, Homo sapiens
ctcagtgtatagatggcac

SEQ ID NO: 3356 - DNA, 19 bp, Homo sapiens
tcagtgtatagatggcact

SEQ ID NO: 3357 - DNA, 19 bp, Homo sapiens
cagtgtatagatggcacta

SEQ ID NO: 3358 - DNA, 19 bp, Homo sapiens
agtgtatagatggcactat

SEQ ID NO: 3359 - DNA, 19 bp, Homo sapiens
gtgtatagatggcactatc

SEQ ID NO: 3360 - DNA, 19 bp, Homo sapiens
tgtatagatggcactatcg

SEQ ID NO: 3361 - DNA, 19 bp, Homo sapiens
gtatagatggcactatcga

SEQ ID NO: 3362 - DNA, 19 bp, Homo sapiens
tatagatggcactatcgaa

SEQ ID NO: 3363 - DNA, 19 bp, Homo sapiens
atagatggcactatcgaag

SEQ ID NO: 3364 - DNA, 19 bp, Homo sapiens
tagatggcactatcgaagt

SEQ ID NO: 3365 - DNA, 19 bp, Homo sapiens
agatggcactatcgaagtc

SEQ ID NO: 3366 - DNA, 19 bp, Homo sapiens
gatggcactatcgaagtcc

SEQ ID NO: 3367 - DNA, 19 bp, Homo sapiens
atggcactatcgaagtccc

SEQ ID NO: 3368 - DNA, 19 bp, Homo sapiens
tggcactatcgaagtcccc

SEQ ID NO: 3369 - DNA, 19 bp, Homo sapiens
ggcactatcgaagtcccca

SEQ ID NO: 3370 - DNA, 19 bp, Homo sapiens
gcactatcgaagtccccaa

SEQ ID NO: 3371 - DNA, 19 bp, Homo sapiens
cactatcgaagtccccaaa

SEQ ID NO: 3372 - DNA, 19 bp, Homo sapiens
actatcgaagtccccaaat

SEQ ID NO: 3373 - DNA, 19 bp, Homo sapiens
ctatcgaagtccccaaatg

SEQ ID NO: 3374 - DNA, 19 bp, Homo sapiens
tatcgaagtccccaaatgc

SEQ ID NO: 3375 - DNA, 19 bp, Homo sapiens
atcgaagtccccaaatgct

SEQ ID NO: 3376 - DNA, 19 bp, Homo sapiens
tcgaagtccccaaatgctt

SEQ ID NO: 3377 - DNA, 19 bp, Homo sapiens
cgaagtccccaaatgcttc

SEQ ID NO: 3378 - DNA, 19 bp, Homo sapiens
gaagtccccaaatgcttca

SEQ ID NO: 3379 - DNA, 19 bp, Homo sapiens
aagtccccaaatgcttcaa

SEQ ID NO: 3380 - DNA, 19 bp, Homo sapiens
agtccccaaatgcttcaag

SEQ ID NO: 3381 - DNA, 19 bp, Homo sapiens
gtccccaaatgcttcaagg

SEQ ID NO: 3382 - DNA, 19 bp, Homo sapiens
tccccaaatgcttcaagga

SEQ ID NO: 3383 - DNA, 19 bp, Homo sapiens
ccccaaatgcttcaaggaa

SEQ ID NO: 3384 - DNA, 19 bp, Homo sapiens
cccaaatgcttcaaggaac

SEQ ID NO: 3385 - DNA, 19 bp, Homo sapiens
ccaaatgcttcaaggaaca

SEQ ID NO: 3386 - DNA, 19 bp, Homo sapiens
caaatgcttcaaggaacac

SEQ ID NO: 3387 - DNA, 19 bp, Homo sapiens
aaatgcttcaaggaacaca

SEQ ID NO: 3388 - DNA, 19 bp, Homo sapiens
aatgcttcaaggaacacag

SEQ ID NO: 3389 - DNA, 19 bp, Homo sapiens
atgcttcaaggaacacagt

SEQ ID NO: 3390 - DNA, 19 bp, Homo sapiens
tgcttcaaggaacacagtt

SEQ ID NO: 3391 - DNA, 19 bp, Homo sapiens
gcttcaaggaacacagttc

SEQ ID NO: 3392 - DNA, 19 bp, Homo sapiens
cttcaaggaacacagttct

SEQ ID NO: 3393 - DNA, 19 bp, Homo sapiens
ttcaaggaacacagttctc

SEQ ID NO: 3394 - DNA, 19 bp, Homo sapiens
tcaaggaacacagttctct

SEQ ID NO: 3395 - DNA, 19 bp, Homo sapiens
caaggaacacagttctctg

SEQ ID NO: 3396 - DNA, 19 bp, Homo sapiens
aaggaacacagttctctgg

SEQ ID NO: 3397 - DNA, 19 bp, Homo sapiens
aggaacacagttctctggc

SEQ ID NO: 3398 - DNA, 19 bp, Homo sapiens
ggaacacagttctctggct

SEQ ID NO: 3399 - DNA, 19 bp, Homo sapiens
gaacacagttctctggctt

SEQ ID NO: 3400 - DNA, 19 bp, Homo sapiens
aacacagttctctggcttt

SEQ ID NO: 3401 - DNA, 19 bp, Homo sapiens
acacagttctctggctttt

SEQ ID NO: 3402 - DNA, 19 bp, Homo sapiens
cacagttctctggcttttt

SEQ ID NO: 3403 - DNA, 19 bp, Homo sapiens
acagttctctggctttttg

SEQ ID NO: 3404 - DNA, 19 bp, Homo sapiens
cagttctctggctttttgg

SEQ ID NO: 3405 - DNA, 19 bp, Homo sapiens
agttctctggctttttgga

SEQ ID NO: 3406 - DNA, 19 bp, Homo sapiens
gttctctggctttttggaa

SEQ ID NO: 3407 - DNA, 19 bp, Homo sapiens
ttctctggctttttggaaa

SEQ ID NO: 3408 - DNA, 19 bp, Homo sapiens
tctctggctttttggaaaa

SEQ ID NO: 3409 - DNA, 19 bp, Homo sapiens
ctctggctttttggaaaac

SEQ ID NO: 3410 - DNA, 19 bp, Homo sapiens
tctggctttttggaaaact

SEQ ID NO: 3411 - DNA, 19 bp, Homo sapiens
ctggctttttggaaaactg

SEQ ID NO: 3412 - DNA, 19 bp, Homo sapiens
tggctttttggaaaactga

SEQ ID NO: 3413 - DNA, 19 bp, Homo sapiens
ggctttttggaaaactgat

SEQ ID NO: 3414 - DNA, 19 bp, Homo sapiens
gctttttggaaaactgatg

SEQ ID NO: 3415 - DNA, 19 bp, Homo sapiens
ctttttggaaaactgatgc

SEQ ID NO: 3416 - DNA, 19 bp, Homo sapiens
tttttggaaaactgatgca

SEQ ID NO: 3417 - DNA, 19 bp, Homo sapiens
ttttggaaaactgatgcat

SEQ ID NO: 3418 - DNA, 19 bp, Homo sapiens
tttggaaaactgatgcatc

SEQ ID NO: 3419 - DNA, 19 bp, Homo sapiens
ttggaaaactgatgcatcc

SEQ ID NO: 3420 - DNA, 19 bp, Homo sapiens
tggaaaactgatgcatccg

SEQ ID NO: 3421 - DNA, 19 bp, Homo sapiens
ggaaaactgatgcatccga

SEQ ID NO: 3422 - DNA, 19 bp, Homo sapiens
gaaaactgatgcatccgat

SEQ ID NO: 3423 - DNA, 19 bp, Homo sapiens
aaaactgatgcatccgatg

SEQ ID NO: 3424 - DNA, 19 bp, Homo sapiens
aaactgatgcatccgatgt

SEQ ID NO: 3425 - DNA, 19 bp, Homo sapiens
aactgatgcatccgatgta

SEQ ID NO: 3426 - DNA, 19 bp, Homo sapiens
actgatgcatccgatgtaa

SEQ ID NO: 3427 - DNA, 19 bp, Homo sapiens
ctgatgcatccgatgtaaa

SEQ ID NO: 3428 - DNA, 19 bp, Homo sapiens
tgatgcatccgatgtaaag

SEQ ID NO: 3429 - DNA, 19 bp, Homo sapiens
gatgcatccgatgtaaagc

SEQ ID NO: 3430 - DNA, 19 bp, Homo sapiens
atgcatccgatgtaaagcc

SEQ ID NO: 3431 - DNA, 19 bp, Homo sapiens
tgcatccgatgtaaagcca

SEQ ID NO: 3432 - DNA, 19 bp, Homo sapiens
gcatccgatgtaaagccat

SEQ ID NO: 3433 - DNA, 19 bp, Homo sapiens
catccgatgtaaagccatg

SEQ ID NO: 3434 - DNA, 19 bp, Homo sapiens
atccgatgtaaagccatgc

SEQ ID NO: 3435 - DNA, 19 bp, Homo sapiens
tccgatgtaaagccatgct

SEQ ID NO: 3436 - DNA, 19 bp, Homo sapiens
ccgatgtaaagccatgcta

SEQ ID NO: 3437 - DNA, 19 bp, Homo sapiens
cgatgtaaagccatgctaa

SEQ ID NO: 3438 - DNA, 19 bp, Homo sapiens
gatgtaaagccatgctaag

SEQ ID NO: 3439 - DNA, 19 bp, Homo sapiens
atgtaaagccatgctaagg

SEQ ID NO: 3440 - DNA, 19 bp, Homo sapiens
tgtaaagccatgctaaggt

SEQ ID NO: 3441 - DNA, 19 bp, Homo sapiens
gtaaagccatgctaaggtg

SEQ ID NO: 3442 - DNA, 19 bp, Homo sapiens
taaagccatgctaaggtgg

SEQ ID NO: 3443 - DNA, 19 bp, Homo sapiens
aaagccatgctaaggtggt

SEQ ID NO: 3444 - DNA, 19 bp, Homo sapiens
aagccatgctaaggtggtt

SEQ ID NO: 3445 - DNA, 19 bp, Homo sapiens
agccatgctaaggtggttt

SEQ ID NO: 3446 - DNA, 19 bp, Homo sapiens
gccatgctaaggtggtttt

SEQ ID NO: 3447 - DNA, 19 bp, Homo sapiens
ccatgctaaggtggttttc

SEQ ID NO: 3448 - DNA, 19 bp, Homo sapiens
catgctaaggtggttttca

SEQ ID NO: 3449 - DNA, 19 bp, Homo sapiens
atgctaaggtggttttcag

SEQ ID NO: 3450 - DNA, 19 bp, Homo sapiens
tgctaaggtggttttcaga

SEQ ID NO: 3451 - DNA, 19 bp, Homo sapiens
gctaaggtggttttcagat

SEQ ID NO: 3452 - DNA, 19 bp, Homo sapiens
ctaaggtggttttcagatt

SEQ ID NO: 3453 - DNA, 19 bp, Homo sapiens
taaggtggttttcagattc

SEQ ID NO: 3454 - DNA, 19 bp, Homo sapiens
aaggtggttttcagattcc

SEQ ID NO: 3455 - DNA, 19 bp, Homo sapiens
aggtggttttcagattcca

SEQ ID NO: 3456 - DNA, 19 bp, Homo sapiens
ggtggttttcagattccac

SEQ ID NO: 3457 - DNA, 19 bp, Homo sapiens
gtggttttcagattccaca

SEQ ID NO: 3458 - DNA, 19 bp, Homo sapiens
tggttttcagattccacac

SEQ ID NO: 3459 - DNA, 19 bp, Homo sapiens
ggttttcagattccacaca

SEQ ID NO: 3460 - DNA, 19 bp, Homo sapiens
gttttcagattccacacaa

SEQ ID NO: 3461 - DNA, 19 bp, Homo sapiens
ttttcagattccacacaaa

SEQ ID NO: 3462 - DNA, 19 bp, Homo sapiens
tttcagattccacacaaaa

SEQ ID NO: 3463 - DNA, 19 bp, Homo sapiens
ttcagattccacacaaaat

SEQ ID NO: 3464 - DNA, 19 bp, Homo sapiens
tcagattccacacaaaatg

SEQ ID NO: 3465 - DNA, 19 bp, Homo sapiens
cagattccacacaaaatgt

SEQ ID NO: 3466 - DNA, 19 bp, Homo sapiens
agattccacacaaaatgtc

SEQ ID NO: 3467 - DNA, 19 bp, Homo sapiens
gattccacacaaaatgtca

SEQ ID NO: 3468 - DNA, 19 bp, Homo sapiens
attccacacaaaatgtcac

SEQ ID NO: 3469 - DNA, 19 bp, Homo sapiens
ttccacacaaaatgtcaca

SEQ ID NO: 3470 - DNA, 19 bp, Homo sapiens
tccacacaaaatgtcacac

SEQ ID NO: 3471 - DNA, 19 bp, Homo sapiens
ccacacaaaatgtcacact

SEQ ID NO: 3472 - DNA, 19 bp, Homo sapiens
cacacaaaatgtcacactt

SEQ ID NO: 3473 - DNA, 19 bp, Homo sapiens
acacaaaatgtcacacttg

SEQ ID NO: 3474 - DNA, 19 bp, Homo sapiens
cacaaaatgtcacacttgt

SEQ ID NO: 3475 - DNA, 19 bp, Homo sapiens
acaaaatgtcacacttgtt

SEQ ID NO: 3476 - DNA, 19 bp, Homo sapiens
caaaatgtcacacttgttt

SEQ ID NO: 3477 - DNA, 19 bp, Homo sapiens
aaaatgtcacacttgtttc

SEQ ID NO: 3478 - DNA, 19 bp, Homo sapiens
aaatgtcacacttgtttct

SEQ ID NO: 3479 - DNA, 19 bp, Homo sapiens
aatgtcacacttgtttctt

SEQ ID NO: 3480 - DNA, 19 bp, Homo sapiens
atgtcacacttgtttcttg

SEQ ID NO: 3481 - DNA, 19 bp, Homo sapiens
tgtcacacttgtttcttgt

SEQ ID NO: 3482 - DNA, 19 bp, Homo sapiens
gtcacacttgtttcttgtt

SEQ ID NO: 3483 - DNA, 19 bp, Homo sapiens
tcacacttgtttcttgttc

SEQ ID NO: 3484 - DNA, 19 bp, Homo sapiens
cacacttgtttcttgttca

SEQ ID NO: 3485 - DNA, 19 bp, Homo sapiens
acacttgtttcttgttcat

SEQ ID NO: 3486 - DNA, 19 bp, Homo sapiens
cacttgtttcttgttcatc

SEQ ID NO: 3487 - DNA, 19 bp, Homo sapiens
acttgtttcttgttcatcc

SEQ ID NO: 3488 - DNA, 19 bp, Homo sapiens
cttgtttcttgttcatcca

SEQ ID NO: 3489 - DNA, 19 bp, Homo sapiens
ttgtttcttgttcatccaa

SEQ ID NO: 3490 - DNA, 19 bp, Homo sapiens
tgtttcttgttcatccaag

SEQ ID NO: 3491 - DNA, 19 bp, Homo sapiens
gtttcttgttcatccaagg

SEQ ID NO: 3492 - DNA, 19 bp, Homo sapiens
tttcttgttcatccaagga

SEQ ID NO: 3493 - DNA, 19 bp, Homo sapiens
ttcttgttcatccaaggaa

SEQ ID NO: 3494 - DNA, 19 bp, Homo sapiens
tcttgttcatccaaggaac

SEQ ID NO: 3495 - DNA, 19 bp, Homo sapiens
cttgttcatccaaggaacc

SEQ ID NO: 3496 - DNA, 19 bp, Homo sapiens
ttgttcatccaaggaacct

SEQ ID NO: 3497 - DNA, 19 bp, Homo sapiens
tgttcatccaaggaaccta

SEQ ID NO: 3498 - DNA, 19 bp, Homo sapiens
gttcatccaaggaacctaa

SEQ ID NO: 3499 - DNA, 19 bp, Homo sapiens
ttcatccaaggaacctaat

SEQ ID NO: 3500 - DNA, 19 bp, Homo sapiens
tcatccaaggaacctaatt

SEQ ID NO: 3501 - DNA, 19 bp, Homo sapiens
catccaaggaacctaattg

SEQ ID NO: 3502 - DNA, 19 bp, Homo sapiens
atccaaggaacctaattga

SEQ ID NO: 3503 - DNA, 19 bp, Homo sapiens
tccaaggaacctaattgaa

SEQ ID NO: 3504 - DNA, 19 bp, Homo sapiens
ccaaggaacctaattgaaa

SEQ ID NO: 3505 - DNA, 19 bp, Homo sapiens
caaggaacctaattgaaat

SEQ ID NO: 3506 - DNA, 19 bp, Homo sapiens
aaggaacctaattgaaatt

SEQ ID NO: 3507 - DNA, 19 bp, Homo sapiens
aggaacctaattgaaattt

SEQ ID NO: 3508 - DNA, 19 bp, Homo sapiens
ggaacctaattgaaattta

SEQ ID NO: 3509 - DNA, 19 bp, Homo sapiens
gaacctaattgaaatttaa

SEQ ID NO: 3510 - DNA, 19 bp, Homo sapiens
aacctaattgaaatttaaa

SEQ ID NO: 3511 - DNA, 19 bp, Homo sapiens
acctaattgaaatttaaaa

SEQ ID NO: 3512 - DNA, 19 bp, Homo sapiens
cctaattgaaatttaaaaa

SEQ ID NO: 3513 - DNA, 19 bp, Homo sapiens
ctaattgaaatttaaaaat

SEQ ID NO: 3514 - DNA, 19 bp, Homo sapiens
taattgaaatttaaaaata

SEQ ID NO: 3515 - DNA, 19 bp, Homo sapiens
aattgaaatttaaaaataa

SEQ ID NO: 3516 - DNA, 19 bp, Homo sapiens
attgaaatttaaaaataaa

SEQ ID NO: 3517 - DNA, 19 bp, Homo sapiens
ttgaaatttaaaaataaag

SEQ ID NO: 3518 - DNA, 19 bp, Homo sapiens
tgaaatttaaaaataaagc

SEQ ID NO: 3519 - DNA, 19 bp, Homo sapiens
gaaatttaaaaataaagct

SEQ ID NO: 3520 - DNA, 19 bp, Homo sapiens
aaatttaaaaataaagcta

SEQ ID NO: 3521 - DNA, 19 bp, Homo sapiens
aatttaaaaataaagctac

SEQ ID NO: 3522 - DNA, 19 bp, Homo sapiens
atttaaaaataaagctact

SEQ ID NO: 3523 - DNA, 19 bp, Homo sapiens
tttaaaaataaagctactg

SEQ ID NO: 3524 - DNA, 19 bp, Homo sapiens
ttaaaaataaagctactga

SEQ ID NO: 3525 - DNA, 19 bp, Homo sapiens
taaaaataaagctactgaa

SEQ ID NO: 3526 - DNA, 19 bp, Homo sapiens
aaaaataaagctactgaat

SEQ ID NO: 3527 - DNA, 19 bp, Homo sapiens
aaaataaagctactgaatt

SEQ ID NO: 3528 - DNA, 19 bp, Homo sapiens
aaataaagctactgaattt

SEQ ID NO: 3529 - DNA, 19 bp, Homo sapiens
aataaagctactgaattta

SEQ ID NO: 3530 - DNA, 19 bp, Homo sapiens
ataaagctactgaatttat

SEQ ID NO: 3531 - DNA, 19 bp, Homo sapiens
taaagctactgaatttatt

SEQ ID NO: 3532 - DNA, 19 bp, Homo sapiens
aaagctactgaatttattg

SEQ ID NO: 3533 - DNA, 19 bp, Homo sapiens
aagctactgaatttattgc

SEQ ID NO: 3534 - DNA, 19 bp, Homo sapiens
agctactgaatttattgcc

SEQ ID NO: 3535 - DNA, 19 bp, Homo sapiens
gctactgaatttattgccg

SEQ ID NO: 3536 - DNA, 19 bp, Homo sapiens
ctactgaatttattgccgc

SEQ ID NO: 3537 - DNA, 19 bp, Homo sapiens
tactgaatttattgccgca

SEQ ID NO: 3538 - DNA, 19 bp, Homo sapiens
actgaatttattgccgcac

SEQ ID NO: 3539 - DNA, 19 bp, Homo sapiens
ctgaatttattgccgcacc

SEQ ID NO: 3540 - DNA, 19 bp, Homo sapiens
tgaatttattgccgcaccc

SEQ ID NO: 3541 - RNA, 1216 nt, Homo sapiens
ggcucugucuuuuuagcagacgaaaaccacuuugguagugccagugugacucauccacaaugauuucuccagugcucaucuuguucucgaguuuucucugccauguugcuauugcaggacggaccugucccaagccagaugauuuaccauuuuccacaguggucccguuaaaaacauucuaugagccaggagaagagauuacguauuccugcaagccgggcuaugugucccgaggagggaugagaaaguuuaucugcccucucacaggacuguggcccaucaacacucugaaauguacacccagaguauguccuuuugcuggaaucuuagaaaauggagccguacgcuauacgacuuuugaauaucccaacacgaucaguuuuucuuguaacacuggguuuuaucugaauggcgcugauucugccaagugcacugaggaaggaaaauggagcccggagcuuccugucugugcucccaucaucugcccuccaccauccauaccuacguuugcaacacuucguguuuauaagccaucagcuggaaacaauucccucuaucgggacacagcaguuuuugaauguuugccacaacaugcgauguuuggaaaugauacaauuaccugcacgacacauggaaauuggacuaaauuaccagaaugcagggaaguaaaaugcccauucccaucaagaccagacaauggauuugugaacuauccugcaaaaccaacacuuuauuacaaggauaaagccacauuuggcugccaugauggauauucucuggauggcccggaagaaauagaauguaccaaacugggaaacuggucugccaugccaaguuguaaagcaucuuguaaaguaccugugaaaaaagccacugugguguaccaaggagagagaguaaagauucaggaaaaauuuaagaauggaaugcuacauggugauaaaguuucuuucuucugcaaaaauaaggaaaagaaguguagcuauacagaggaugcucaguguauagauggcacuaucgaaguccccaaaugcuucaaggaacacaguucucuggcuuuuuggaaaacugaugcauccgauguaaagccaugcuaaggugguuuucagauuccacacaaaaugucacacuuguuucuuguucauccaaggaaccuaauugaaauuuaaaaauaaagcuacugaauuuauugccgcacccaaaaaaaaaaaaaaaa

SEQ ID NO: 3542-4000 - skipped (459 entries)

SEQ ID NO: 4001 - RNA, 21 nt, Artificial Sequence
  siRNA sense strand against b2GPI
ugguagugccagugugacuca

SEQ ID NO: 4002 - RNA, 21 nt, Artificial Sequence
  siRNA sense strand against b2GPI
gguagugccagugugacucau

SEQ ID NO: 4003 - RNA, 21 nt, Artificial Sequence
  siRNA sense strand against b2GPI
guagugccagugugacucauc

SEQ ID NO: 4004 - RNA, 21 nt, Artificial Sequence
  siRNA sense strand against b2GPI
uagugccagugugacucaucc

SEQ ID NO: 4005 - RNA, 21 nt, Artificial Sequence
  siRNA sense strand against b2GPI
agugccagugugacucaucca

SEQ ID NO: 4006 - RNA, 21 nt, Artificial Sequence
  siRNA sense strand against b2GPI
gugccagugugacucauccac

SEQ ID NO: 4007 - RNA, 21 nt, Artificial Sequence
  siRNA sense strand against b2GPI
ugccagugugacucauccaca

SEQ ID NO: 4008 - RNA, 21 nt, Artificial Sequence
  siRNA sense strand against b2GPI
gccagugugacucauccacaa

SEQ ID NO: 4009 - RNA, 21 nt, Artificial Sequence
  siRNA sense strand against b2GPI
ccagugugacucauccacaau

SEQ ID NO: 4010 - RNA, 21 nt, Artificial Sequence
  siRNA sense strand against b2GPI
cagugugacucauccacaaug

SEQ ID NO: 4011 - RNA, 21 nt, Artificial Sequence
  siRNA sense strand against b2GPI
agugugacucauccacaauga

SEQ ID NO: 4012 - RNA, 21 nt, Artificial Sequence
  siRNA sense strand against b2GPI
gugugacucauccacaaugau

SEQ ID NO: 4013 - RNA, 21 nt, Artificial Sequence
  siRNA sense strand against b2GPI
ugugacucauccacaaugauu

SEQ ID NO: 4014 - RNA, 21 nt, Artificial Sequence
  siRNA sense strand against b2GPI
gugacucauccacaaugauuu

SEQ ID NO: 4015 - RNA, 21 nt, Artificial Sequence
  siRNA sense strand against b2GPI
ugacucauccacaaugauuuc

SEQ ID NO: 4016 - RNA, 21 nt, Artificial Sequence
  siRNA sense strand against b2GPI
gacucauccacaaugauuucu

SEQ ID NO: 4017 - RNA, 21 nt, Artificial Sequence
  siRNA sense strand against b2GPI
cucauccacaaugauuucucc

SEQ ID NO: 4018 - RNA, 21 nt, Artificial Sequence
  siRNA sense strand against b2GPI
ucauccacaaugauuucucca

SEQ ID NO: 4019 - RNA, 21 nt, Artificial Sequence
  siRNA sense strand against b2GPI
cauccacaaugauuucuccag

SEQ ID NO: 4020 - RNA, 21 nt, Artificial Sequence
  siRNA sense strand against b2GPI
auccacaaugauuucuccagu

SEQ ID NO: 4021 - RNA, 21 nt, Artificial Sequence
  siRNA sense strand against b2GPI
uccacaaugauuucuccagug

SEQ ID NO: 4022 - RNA, 21 nt, Artificial Sequence
  siRNA sense strand against b2GPI
ccacaaugauuucuccagugc

SEQ ID NO: 4023 - RNA, 21 nt, Artificial Sequence
  siRNA sense strand against b2GPI
cacaaugauuucuccagugcu

SEQ ID NO: 4024 - RNA, 21 nt, Artificial Sequence
  siRNA sense strand against b2GPI
acaaugauuucuccagugcuc

SEQ ID NO: 4025 - RNA, 21 nt, Artificial Sequence
  siRNA sense strand against b2GPI
caaugauuucuccagugcuca

SEQ ID NO: 4026 - RNA, 21 nt, Artificial Sequence
  siRNA sense strand against b2GPI
aaugauuucuccagugcucau

SEQ ID NO: 4027 - RNA, 21 nt, Artificial Sequence
  siRNA sense strand against b2GPI
augauuucuccagugcucauc

SEQ ID NO: 4028 - RNA, 21 nt, Artificial Sequence
  siRNA sense strand against b2GPI
ugauuucuccagugcucaucu

SEQ ID NO: 4029 - RNA, 21 nt, Artificial Sequence
  siRNA sense strand against b2GPI
gauuucuccagugcucaucuu

SEQ ID NO: 4030 - RNA, 21 nt, Artificial Sequence
  siRNA sense strand against b2GPI
auuucuccagugcucaucuug

SEQ ID NO: 4031 - RNA, 21 nt, Artificial Sequence
  siRNA sense strand against b2GPI
uuucuccagugcucaucuugu

SEQ ID NO: 4032 - RNA, 21 nt, Artificial Sequence
  siRNA sense strand against b2GPI
uucuccagugcucaucuuguu

SEQ ID NO: 4033 - RNA, 21 nt, Artificial Sequence
  siRNA sense strand against b2GPI
ucuccagugcucaucuuguuc

SEQ ID NO: 4034 - RNA, 21 nt, Artificial Sequence
  siRNA sense strand against b2GPI
cuccagugcucaucuuguucu

SEQ ID NO: 4035 - RNA, 21 nt, Artificial Sequence
  siRNA sense strand against b2GPI
uccagugcucaucuuguucuc

SEQ ID NO: 4036 - RNA, 21 nt, Artificial Sequence
  siRNA sense strand against b2GPI
ccagugcucaucuuguucucg

SEQ ID NO: 4037 - RNA, 21 nt, Artificial Sequence
  siRNA sense strand against b2GPI
cagugcucaucuuguucucga

SEQ ID NO: 4038 - RNA, 21 nt, Artificial Sequence
  siRNA sense strand against b2GPI
agugcucaucuuguucucgag

SEQ ID NO: 4039 - RNA, 21 nt, Artificial Sequence
  siRNA sense strand against b2GPI
gugcucaucuuguucucgagu

SEQ ID NO: 4040 - RNA, 21 nt, Artificial Sequence
  siRNA sense strand against b2GPI
ugcucaucuuguucucgaguu

SEQ ID NO: 4041 - RNA, 21 nt, Artificial Sequence
  siRNA sense strand against b2GPI
gcucaucuuguucucgaguuu

SEQ ID NO: 4042 - RNA, 21 nt, Artificial Sequence
  siRNA sense strand against b2GPI
cucaucuuguucucgaguuuu

SEQ ID NO: 4043 - RNA, 21 nt, Artificial Sequence
  siRNA sense strand against b2GPI
ucaucuuguucucgaguuuuc

SEQ ID NO: 4044 - RNA, 21 nt, Artificial Sequence
  siRNA sense strand against b2GPI
caucuuguucucgaguuuucu

SEQ ID NO: 4045 - RNA, 21 nt, Artificial Sequence
  siRNA sense strand against b2GPI
aucuuguucucgaguuuucuc

SEQ ID NO: 4046 - RNA, 21 nt, Artificial Sequence
  siRNA sense strand against b2GPI
ucuuguucucgaguuuucucu

SEQ ID NO: 4047 - RNA, 21 nt, Artificial Sequence
  siRNA sense strand against b2GPI
cuuguucucgaguuuucucug

SEQ ID NO: 4048 - RNA, 21 nt, Artificial Sequence
  siRNA sense strand against b2GPI
uuguucucgaguuuucucugc

SEQ ID NO: 4049 - RNA, 21 nt, Artificial Sequence
  siRNA sense strand against b2GPI
guucucgaguuuucucugcca

SEQ ID NO: 4050 - RNA, 21 nt, Artificial Sequence
  siRNA sense strand against b2GPI
uucucgaguuuucucugccau

SEQ ID NO: 4051 - RNA, 21 nt, Artificial Sequence
  siRNA sense strand against b2GPI
ucucgaguuuucucugccaug

SEQ ID NO: 4052 - RNA, 21 nt, Artificial Sequence
  siRNA sense strand against b2GPI
cucgaguuuucucugccaugu

SEQ ID NO: 4053 - RNA, 21 nt, Artificial Sequence
  siRNA sense strand against b2GPI
ucgaguuuucucugccauguu

SEQ ID NO: 4054 - RNA, 21 nt, Artificial Sequence
  siRNA sense strand against b2GPI
cgaguuuucucugccauguug

SEQ ID NO: 4055 - RNA, 21 nt, Artificial Sequence
  siRNA sense strand against b2GPI
gaguuuucucugccauguugc

SEQ ID NO: 4056 - RNA, 21 nt, Artificial Sequence
  siRNA sense strand against b2GPI
aguuuucucugccauguugcu

SEQ ID NO: 4057 - RNA, 21 nt, Artificial Sequence
  siRNA sense strand against b2GPI
guuuucucugccauguugcua

SEQ ID NO: 4058 - RNA, 21 nt, Artificial Sequence
  siRNA sense strand against b2GPI
uuuucucugccauguugcuau

SEQ ID NO: 4059 - RNA, 21 nt, Artificial Sequence
  siRNA sense strand against b2GPI
uuucucugccauguugcuauu

SEQ ID NO: 4060 - RNA, 21 nt, Artificial Sequence
  siRNA sense strand against b2GPI
cucugccauguugcuauugca

SEQ ID NO: 4061 - RNA, 21 nt, Artificial Sequence
  siRNA sense strand against b2GPI
ucugccauguugcuauugcag

SEQ ID NO: 4062 - RNA, 21 nt, Artificial Sequence
  siRNA sense strand against b2GPI
cugccauguugcuauugcagg

SEQ ID NO: 4063 - RNA, 21 nt, Artificial Sequence
  siRNA sense strand against b2GPI
ugccauguugcuauugcagga

SEQ ID NO: 4064 - RNA, 21 nt, Artificial Sequence
  siRNA sense strand against b2GPI
auguugcuauugcaggacgga

SEQ ID NO: 4065 - RNA, 21 nt, Artificial Sequence
  siRNA sense strand against b2GPI
uugcuauugcaggacggaccu

SEQ ID NO: 4066 - RNA, 21 nt, Artificial Sequence
  siRNA sense strand against b2GPI
ugcuauugcaggacggaccug

SEQ ID NO: 4067 - RNA, 21 nt, Artificial Sequence
  siRNA sense strand against b2GPI
gcuauugcaggacggaccugu

SEQ ID NO: 4068 - RNA, 21 nt, Artificial Sequence
  siRNA sense strand against b2GPI
cuauugcaggacggaccuguc

SEQ ID NO: 4069 - RNA, 21 nt, Artificial Sequence
  siRNA sense strand against b2GPI
uugcaggacggaccuguccca

SEQ ID NO: 4070 - RNA, 21 nt, Artificial Sequence
  siRNA sense strand against b2GPI
gcaggacggaccugucccaag

SEQ ID NO: 4071 - RNA, 21 nt, Artificial Sequence
  siRNA sense strand against b2GPI
caggacggaccugucccaagc

SEQ ID NO: 4072 - RNA, 21 nt, Artificial Sequence
  siRNA sense strand against b2GPI
ggacggaccugucccaagcca

SEQ ID NO: 4073 - RNA, 21 nt, Artificial Sequence
  siRNA sense strand against b2GPI
gacggaccugucccaagccag

SEQ ID NO: 4074 - RNA, 21 nt, Artificial Sequence
  siRNA sense strand against b2GPI
acggaccugucccaagccaga

SEQ ID NO: 4075 - RNA, 21 nt, Artificial Sequence
  siRNA sense strand against b2GPI
cggaccugucccaagccagau

SEQ ID NO: 4076 - RNA, 21 nt, Artificial Sequence
  siRNA sense strand against b2GPI
ggaccugucccaagccagaug

SEQ ID NO: 4077 - RNA, 21 nt, Artificial Sequence
  siRNA sense strand against b2GPI
gaccugucccaagccagauga

SEQ ID NO: 4078 - RNA, 21 nt, Artificial Sequence
  siRNA sense strand against b2GPI
accugucccaagccagaugau

SEQ ID NO: 4079 - RNA, 21 nt, Artificial Sequence
  siRNA sense strand against b2GPI
ccugucccaagccagaugauu

SEQ ID NO: 4080 - RNA, 21 nt, Artificial Sequence
  siRNA sense strand against b2GPI
cugucccaagccagaugauuu

SEQ ID NO: 4081 - RNA, 21 nt, Artificial Sequence
  siRNA sense strand against b2GPI
ugucccaagccagaugauuua

SEQ ID NO: 4082 - RNA, 21 nt, Artificial Sequence
  siRNA sense strand against b2GPI
gucccaagccagaugauuuac

SEQ ID NO: 4083 - RNA, 21 nt, Artificial Sequence
  siRNA sense strand against b2GPI
ucccaagccagaugauuuacc

SEQ ID NO: 4084 - RNA, 21 nt, Artificial Sequence
  siRNA sense strand against b2GPI
cccaagccagaugauuuacca

SEQ ID NO: 4085 - RNA, 21 nt, Artificial Sequence
  siRNA sense strand against b2GPI
ccaagccagaugauuuaccau

SEQ ID NO: 4086 - RNA, 21 nt, Artificial Sequence
  siRNA sense strand against b2GPI
caagccagaugauuuaccauu

SEQ ID NO: 4087 - RNA, 21 nt, Artificial Sequence
  siRNA sense strand against b2GPI
aagccagaugauuuaccauuu

SEQ ID NO: 4088 - RNA, 21 nt, Artificial Sequence
  siRNA sense strand against b2GPI
agccagaugauuuaccauuuu

SEQ ID NO: 4089 - RNA, 21 nt, Artificial Sequence
  siRNA sense strand against b2GPI
gccagaugauuuaccauuuuc

SEQ ID NO: 4090 - RNA, 21 nt, Artificial Sequence
  siRNA sense strand against b2GPI
ccagaugauuuaccauuuucc

SEQ ID NO: 4091 - RNA, 21 nt, Artificial Sequence
  siRNA sense strand against b2GPI
cagaugauuuaccauuuucca

SEQ ID NO: 4092 - RNA, 21 nt, Artificial Sequence
  siRNA sense strand against b2GPI
agaugauuuaccauuuuccac

SEQ ID NO: 4093 - RNA, 21 nt, Artificial Sequence
  siRNA sense strand against b2GPI
gaugauuuaccauuuuccaca

SEQ ID NO: 4094 - RNA, 21 nt, Artificial Sequence
  siRNA sense strand against b2GPI
augauuuaccauuuuccacag

SEQ ID NO: 4095 - RNA, 21 nt, Artificial Sequence
  siRNA sense strand against b2GPI
uuuaccauuuuccacaguggu

SEQ ID NO: 4096 - RNA, 21 nt, Artificial Sequence
  siRNA sense strand against b2GPI
uuaccauuuuccacagugguc

SEQ ID NO: 4097 - RNA, 21 nt, Artificial Sequence
  siRNA sense strand against b2GPI
uaccauuuuccacaguggucc

SEQ ID NO: 4098 - RNA, 21 nt, Artificial Sequence
  siRNA sense strand against b2GPI
auuuuccacaguggucccguu

SEQ ID NO: 4099 - RNA, 21 nt, Artificial Sequence
  siRNA sense strand against b2GPI
uuuuccacaguggucccguua

SEQ ID NO: 4100 - RNA, 21 nt, Artificial Sequence
  siRNA sense strand against b2GPI
uuuccacaguggucccguuaa

SEQ ID NO: 4101 - RNA, 21 nt, Artificial Sequence
  siRNA sense strand against b2GPI
uuccacaguggucccguuaaa

SEQ ID NO: 4102 - RNA, 21 nt, Artificial Sequence
  siRNA sense strand against b2GPI
uccacaguggucccguuaaaa

SEQ ID NO: 4103 - RNA, 21 nt, Artificial Sequence
  siRNA sense strand against b2GPI
ccacaguggucccguuaaaaa

SEQ ID NO: 4104 - RNA, 21 nt, Artificial Sequence
  siRNA sense strand against b2GPI
cacaguggucccguuaaaaac

SEQ ID NO: 4105 - RNA, 21 nt, Artificial Sequence
  siRNA sense strand against b2GPI
acaguggucccguuaaaaaca

SEQ ID NO: 4106 - RNA, 21 nt, Artificial Sequence
  siRNA sense strand against b2GPI
caguggucccguuaaaaacau

SEQ ID NO: 4107 - RNA, 21 nt, Artificial Sequence
  siRNA sense strand against b2GPI
aguggucccguuaaaaacauu

SEQ ID NO: 4108 - RNA, 21 nt, Artificial Sequence
  siRNA sense strand against b2GPI
guggucccguuaaaaacauuc

SEQ ID NO: 4109 - RNA, 21 nt, Artificial Sequence
  siRNA sense strand against b2GPI
uggucccguuaaaaacauucu

SEQ ID NO: 4110 - RNA, 21 nt, Artificial Sequence
  siRNA sense strand against b2GPI
ggucccguuaaaaacauucua

SEQ ID NO: 4111 - RNA, 21 nt, Artificial Sequence
  siRNA sense strand against b2GPI
gucccguuaaaaacauucuau

SEQ ID NO: 4112 - RNA, 21 nt, Artificial Sequence
  siRNA sense strand against b2GPI
ucccguuaaaaacauucuaug

SEQ ID NO: 4113 - RNA, 21 nt, Artificial Sequence
  siRNA sense strand against b2GPI
cccguuaaaaacauucuauga

SEQ ID NO: 4114 - RNA, 21 nt, Artificial Sequence
  siRNA sense strand against b2GPI
aacauucuaugagccaggaga

SEQ ID NO: 4115 - RNA, 21 nt, Artificial Sequence
  siRNA sense strand against b2GPI
acauucuaugagccaggagaa

SEQ ID NO: 4116 - RNA, 21 nt, Artificial Sequence
  siRNA sense strand against b2GPI
uucuaugagccaggagaagag

SEQ ID NO: 4117 - RNA, 21 nt, Artificial Sequence
  siRNA sense strand against b2GPI
ucuaugagccaggagaagaga

SEQ ID NO: 4118 - RNA, 21 nt, Artificial Sequence
  siRNA sense strand against b2GPI
cuaugagccaggagaagagau

SEQ ID NO: 4119 - RNA, 21 nt, Artificial Sequence
  siRNA sense strand against b2GPI
uaugagccaggagaagagauu

SEQ ID NO: 4120 - RNA, 21 nt, Artificial Sequence
  siRNA sense strand against b2GPI
augagccaggagaagagauua

SEQ ID NO: 4121 - RNA, 21 nt, Artificial Sequence
  siRNA sense strand against b2GPI
gagccaggagaagagauuacg

SEQ ID NO: 4122 - RNA, 21 nt, Artificial Sequence
  siRNA sense strand against b2GPI
agccaggagaagagauuacgu

SEQ ID NO: 4123 - RNA, 21 nt, Artificial Sequence
  siRNA sense strand against b2GPI
gccaggagaagagauuacgua

SEQ ID NO: 4124 - RNA, 21 nt, Artificial Sequence
  siRNA sense strand against b2GPI
ccaggagaagagauuacguau

SEQ ID NO: 4125 - RNA, 21 nt, Artificial Sequence
  siRNA sense strand against b2GPI
caggagaagagauuacguauu

SEQ ID NO: 4126 - RNA, 21 nt, Artificial Sequence
  siRNA sense strand against b2GPI
aggagaagagauuacguauuc

SEQ ID NO: 4127 - RNA, 21 nt, Artificial Sequence
  siRNA sense strand against b2GPI
ggagaagagauuacguauucc

SEQ ID NO: 4128 - RNA, 21 nt, Artificial Sequence
  siRNA sense strand against b2GPI
gagaagagauuacguauuccu

SEQ ID NO: 4129 - RNA, 21 nt, Artificial Sequence
  siRNA sense strand against b2GPI
aagagauuacguauuccugca

SEQ ID NO: 4130 - RNA, 21 nt, Artificial Sequence
  siRNA sense strand against b2GPI
agagauuacguauuccugcaa

SEQ ID NO: 4131 - RNA, 21 nt, Artificial Sequence
  siRNA sense strand against b2GPI
gagauuacguauuccugcaag

SEQ ID NO: 4132 - RNA, 21 nt, Artificial Sequence
  siRNA sense strand against b2GPI
uuacguauuccugcaagccgg

SEQ ID NO: 4133 - RNA, 21 nt, Artificial Sequence
  siRNA sense strand against b2GPI
guauuccugcaagccgggcua

SEQ ID NO: 4134 - RNA, 21 nt, Artificial Sequence
  siRNA sense strand against b2GPI
uccugcaagccgggcuaugug

SEQ ID NO: 4135 - RNA, 21 nt, Artificial Sequence
  siRNA sense strand against b2GPI
gugucccgaggagggaugaga

SEQ ID NO: 4136 - RNA, 21 nt, Artificial Sequence
  siRNA sense strand against b2GPI
ugucccgaggagggaugagaa

SEQ ID NO: 4137 - RNA, 21 nt, Artificial Sequence
  siRNA sense strand against b2GPI
cccgaggagggaugagaaagu

SEQ ID NO: 4138 - RNA, 21 nt, Artificial Sequence
  siRNA sense strand against b2GPI
ccgaggagggaugagaaaguu

SEQ ID NO: 4139 - RNA, 21 nt, Artificial Sequence
  siRNA sense strand against b2GPI
cgaggagggaugagaaaguuu

SEQ ID NO: 4140 - RNA, 21 nt, Artificial Sequence
  siRNA sense strand against b2GPI
gaggagggaugagaaaguuua

SEQ ID NO: 4141 - RNA, 21 nt, Artificial Sequence
  siRNA sense strand against b2GPI
aggagggaugagaaaguuuau

SEQ ID NO: 4142 - RNA, 21 nt, Artificial Sequence
  siRNA sense strand against b2GPI
ggagggaugagaaaguuuauc

SEQ ID NO: 4143 - RNA, 21 nt, Artificial Sequence
  siRNA sense strand against b2GPI
gagggaugagaaaguuuaucu

SEQ ID NO: 4144 - RNA, 21 nt, Artificial Sequence
  siRNA sense strand against b2GPI
agggaugagaaaguuuaucug

SEQ ID NO: 4145 - RNA, 21 nt, Artificial Sequence
  siRNA sense strand against b2GPI
gagaaaguuuaucugcccucu

SEQ ID NO: 4146 - RNA, 21 nt, Artificial Sequence
  siRNA sense strand against b2GPI
gaaaguuuaucugcccucuca

SEQ ID NO: 4147 - RNA, 21 nt, Artificial Sequence
  siRNA sense strand against b2GPI
ugcccucucacaggacugugg

SEQ ID NO: 4148 - RNA, 21 nt, Artificial Sequence
  siRNA sense strand against b2GPI
ucucacaggacuguggcccau

SEQ ID NO: 4149 - RNA, 21 nt, Artificial Sequence
  siRNA sense strand against b2GPI
ucacaggacuguggcccauca

SEQ ID NO: 4150 - RNA, 21 nt, Artificial Sequence
  siRNA sense strand against b2GPI
caggacuguggcccaucaaca

SEQ ID NO: 4151 - RNA, 21 nt, Artificial Sequence
  siRNA sense strand against b2GPI
aggacuguggcccaucaacac

SEQ ID NO: 4152 - RNA, 21 nt, Artificial Sequence
  siRNA sense strand against b2GPI
guggcccaucaacacucugaa

SEQ ID NO: 4153 - RNA, 21 nt, Artificial Sequence
  siRNA sense strand against b2GPI
ggcccaucaacacucugaaau

SEQ ID NO: 4154 - RNA, 21 nt, Artificial Sequence
  siRNA sense strand against b2GPI
gcccaucaacacucugaaaug

SEQ ID NO: 4155 - RNA, 21 nt, Artificial Sequence
  siRNA sense strand against b2GPI
cccaucaacacucugaaaugu

SEQ ID NO: 4156 - RNA, 21 nt, Artificial Sequence
  siRNA sense strand against b2GPI
ccaucaacacucugaaaugua

SEQ ID NO: 4157 - RNA, 21 nt, Artificial Sequence
  siRNA sense strand against b2GPI
aucaacacucugaaauguaca

SEQ ID NO: 4158 - RNA, 21 nt, Artificial Sequence
  siRNA sense strand against b2GPI
acacucugaaauguacaccca

SEQ ID NO: 4159 - RNA, 21 nt, Artificial Sequence
  siRNA sense strand against b2GPI
acucugaaauguacacccaga

SEQ ID NO: 4160 - RNA, 21 nt, Artificial Sequence
  siRNA sense strand against b2GPI
cugaaauguacacccagagua

SEQ ID NO: 4161 - RNA, 21 nt, Artificial Sequence
  siRNA sense strand against b2GPI
ugaaauguacacccagaguau

SEQ ID NO: 4162 - RNA, 21 nt, Artificial Sequence
  siRNA sense strand against b2GPI
aaauguacacccagaguaugu

SEQ ID NO: 4163 - RNA, 21 nt, Artificial Sequence
  siRNA sense strand against b2GPI
uguacacccagaguauguccu

SEQ ID NO: 4164 - RNA, 21 nt, Artificial Sequence
  siRNA sense strand against b2GPI
guacacccagaguauguccuu

SEQ ID NO: 4165 - RNA, 21 nt, Artificial Sequence
  siRNA sense strand against b2GPI
uacacccagaguauguccuuu

SEQ ID NO: 4166 - RNA, 21 nt, Artificial Sequence
  siRNA sense strand against b2GPI
acacccagaguauguccuuuu

SEQ ID NO: 4167 - RNA, 21 nt, Artificial Sequence
  siRNA sense strand against b2GPI
cacccagaguauguccuuuug

SEQ ID NO: 4168 - RNA, 21 nt, Artificial Sequence
  siRNA sense strand against b2GPI
cccagaguauguccuuuugcu

SEQ ID NO: 4169 - RNA, 21 nt, Artificial Sequence
  siRNA sense strand against b2GPI
ccagaguauguccuuuugcug

SEQ ID NO: 4170 - RNA, 21 nt, Artificial Sequence
  siRNA sense strand against b2GPI
cagaguauguccuuuugcugg

SEQ ID NO: 4171 - RNA, 21 nt, Artificial Sequence
  siRNA sense strand against b2GPI
agaguauguccuuuugcugga

SEQ ID NO: 4172 - RNA, 21 nt, Artificial Sequence
  siRNA sense strand against b2GPI
gaguauguccuuuugcuggaa

SEQ ID NO: 4173 - RNA, 21 nt, Artificial Sequence
  siRNA sense strand against b2GPI
guauguccuuuugcuggaauc

SEQ ID NO: 4174 - RNA, 21 nt, Artificial Sequence
  siRNA sense strand against b2GPI
uauguccuuuugcuggaaucu

SEQ ID NO: 4175 - RNA, 21 nt, Artificial Sequence
  siRNA sense strand against b2GPI
auguccuuuugcuggaaucuu

SEQ ID NO: 4176 - RNA, 21 nt, Artificial Sequence
  siRNA sense strand against b2GPI
uguccuuuugcuggaaucuua

SEQ ID NO: 4177 - RNA, 21 nt, Artificial Sequence
  siRNA sense strand against b2GPI
guccuuuugcuggaaucuuag

SEQ ID NO: 4178 - RNA, 21 nt, Artificial Sequence
  siRNA sense strand against b2GPI
uccuuuugcuggaaucuuaga

SEQ ID NO: 4179 - RNA, 21 nt, Artificial Sequence
  siRNA sense strand against b2GPI
uuuugcuggaaucuuagaaaa

SEQ ID NO: 4180 - RNA, 21 nt, Artificial Sequence
  siRNA sense strand against b2GPI
uuugcuggaaucuuagaaaau

SEQ ID NO: 4181 - RNA, 21 nt, Artificial Sequence
  siRNA sense strand against b2GPI
uugcuggaaucuuagaaaaug

SEQ ID NO: 4182 - RNA, 21 nt, Artificial Sequence
  siRNA sense strand against b2GPI
ugcuggaaucuuagaaaaugg

SEQ ID NO: 4183 - RNA, 21 nt, Artificial Sequence
  siRNA sense strand against b2GPI
gcuggaaucuuagaaaaugga

SEQ ID NO: 4184 - RNA, 21 nt, Artificial Sequence
  siRNA sense strand against b2GPI
cuggaaucuuagaaaauggag

SEQ ID NO: 4185 - RNA, 21 nt, Artificial Sequence
  siRNA sense strand against b2GPI
aucuuagaaaauggagccgua

SEQ ID NO: 4186 - RNA, 21 nt, Artificial Sequence
  siRNA sense strand against b2GPI
uuagaaaauggagccguacgc

SEQ ID NO: 4187 - RNA, 21 nt, Artificial Sequence
  siRNA sense strand against b2GPI
uagaaaauggagccguacgcu

SEQ ID NO: 4188 - RNA, 21 nt, Artificial Sequence
  siRNA sense strand against b2GPI
agaaaauggagccguacgcua

SEQ ID NO: 4189 - RNA, 21 nt, Artificial Sequence
  siRNA sense strand against b2GPI
gaaaauggagccguacgcuau

SEQ ID NO: 4190 - RNA, 21 nt, Artificial Sequence
  siRNA sense strand against b2GPI
aaaauggagccguacgcuaua

SEQ ID NO: 4191 - RNA, 21 nt, Artificial Sequence
  siRNA sense strand against b2GPI
auggagccguacgcuauacga

SEQ ID NO: 4192 - RNA, 21 nt, Artificial Sequence
  siRNA sense strand against b2GPI
uggagccguacgcuauacgac

SEQ ID NO: 4193 - RNA, 21 nt, Artificial Sequence
  siRNA sense strand against b2GPI
ggagccguacgcuauacgacu

SEQ ID NO: 4194 - RNA, 21 nt, Artificial Sequence
  siRNA sense strand against b2GPI
gagccguacgcuauacgacuu

SEQ ID NO: 4195 - RNA, 21 nt, Artificial Sequence
  siRNA sense strand against b2GPI
agccguacgcuauacgacuuu

SEQ ID NO: 4196 - RNA, 21 nt, Artificial Sequence
  siRNA sense strand against b2GPI
gccguacgcuauacgacuuuu

SEQ ID NO: 4197 - RNA, 21 nt, Artificial Sequence
  siRNA sense strand against b2GPI
ccguacgcuauacgacuuuug

SEQ ID NO: 4198 - RNA, 21 nt, Artificial Sequence
  siRNA sense strand against b2GPI
cguacgcuauacgacuuuuga

SEQ ID NO: 4199 - RNA, 21 nt, Artificial Sequence
  siRNA sense strand against b2GPI
guacgcuauacgacuuuugaa

SEQ ID NO: 4200 - RNA, 21 nt, Artificial Sequence
  siRNA sense strand against b2GPI
uacgcuauacgacuuuugaau

SEQ ID NO: 4201 - RNA, 21 nt, Artificial Sequence
  siRNA sense strand against b2GPI
cgcuauacgacuuuugaauau

SEQ ID NO: 4202 - RNA, 21 nt, Artificial Sequence
  siRNA sense strand against b2GPI
gcuauacgacuuuugaauauc

SEQ ID NO: 4203 - RNA, 21 nt, Artificial Sequence
  siRNA sense strand against b2GPI
auacgacuuuugaauauccca

SEQ ID NO: 4204 - RNA, 21 nt, Artificial Sequence
  siRNA sense strand against b2GPI
uacgacuuuugaauaucccaa

SEQ ID NO: 4205 - RNA, 21 nt, Artificial Sequence
  siRNA sense strand against b2GPI
acgacuuuugaauaucccaac

SEQ ID NO: 4206 - RNA, 21 nt, Artificial Sequence
  siRNA sense strand against b2GPI
cgacuuuugaauaucccaaca

SEQ ID NO: 4207 - RNA, 21 nt, Artificial Sequence
  siRNA sense strand against b2GPI
cuuuugaauaucccaacacga

SEQ ID NO: 4208 - RNA, 21 nt, Artificial Sequence
  siRNA sense strand against b2GPI
uuuugaauaucccaacacgau

SEQ ID NO: 4209 - RNA, 21 nt, Artificial Sequence
  siRNA sense strand against b2GPI
uuugaauaucccaacacgauc

SEQ ID NO: 4210 - RNA, 21 nt, Artificial Sequence
  siRNA sense strand against b2GPI
uugaauaucccaacacgauca

SEQ ID NO: 4211 - RNA, 21 nt, Artificial Sequence
  siRNA sense strand against b2GPI
aauaucccaacacgaucaguu

SEQ ID NO: 4212 - RNA, 21 nt, Artificial Sequence
  siRNA sense strand against b2GPI
auaucccaacacgaucaguuu

SEQ ID NO: 4213 - RNA, 21 nt, Artificial Sequence
  siRNA sense strand against b2GPI
uaucccaacacgaucaguuuu

SEQ ID NO: 4214 - RNA, 21 nt, Artificial Sequence
  siRNA sense strand against b2GPI
aucccaacacgaucaguuuuu

SEQ ID NO: 4215 - RNA, 21 nt, Artificial Sequence
  siRNA sense strand against b2GPI
ucccaacacgaucaguuuuuc

SEQ ID NO: 4216 - RNA, 21 nt, Artificial Sequence
  siRNA sense strand against b2GPI
cccaacacgaucaguuuuucu

SEQ ID NO: 4217 - RNA, 21 nt, Artificial Sequence
  siRNA sense strand against b2GPI
ccaacacgaucaguuuuucuu

SEQ ID NO: 4218 - RNA, 21 nt, Artificial Sequence
  siRNA sense strand against b2GPI
aacacgaucaguuuuucuugu

SEQ ID NO: 4219 - RNA, 21 nt, Artificial Sequence
  siRNA sense strand against b2GPI
acacgaucaguuuuucuugua

SEQ ID NO: 4220 - RNA, 21 nt, Artificial Sequence
  siRNA sense strand against b2GPI
cacgaucaguuuuucuuguaa

SEQ ID NO: 4221 - RNA, 21 nt, Artificial Sequence
  siRNA sense strand against b2GPI
acgaucaguuuuucuuguaac

SEQ ID NO: 4222 - RNA, 21 nt, Artificial Sequence
  siRNA sense strand against b2GPI
cgaucaguuuuucuuguaaca

SEQ ID NO: 4223 - RNA, 21 nt, Artificial Sequence
  siRNA sense strand against b2GPI
aucaguuuuucuuguaacacu

SEQ ID NO: 4224 - RNA, 21 nt, Artificial Sequence
  siRNA sense strand against b2GPI
ucaguuuuucuuguaacacug

SEQ ID NO: 4225 - RNA, 21 nt, Artificial Sequence
  siRNA sense strand against b2GPI
uuucuuguaacacuggguuuu

SEQ ID NO: 4226 - RNA, 21 nt, Artificial Sequence
  siRNA sense strand against b2GPI
uucuuguaacacuggguuuua

SEQ ID NO: 4227 - RNA, 21 nt, Artificial Sequence
  siRNA sense strand against b2GPI
ucuuguaacacuggguuuuau

SEQ ID NO: 4228 - RNA, 21 nt, Artificial Sequence
  siRNA sense strand against b2GPI
cuuguaacacuggguuuuauc

SEQ ID NO: 4229 - RNA, 21 nt, Artificial Sequence
  siRNA sense strand against b2GPI
uuguaacacuggguuuuaucu

SEQ ID NO: 4230 - RNA, 21 nt, Artificial Sequence
  siRNA sense strand against b2GPI
guaacacuggguuuuaucuga

SEQ ID NO: 4231 - RNA, 21 nt, Artificial Sequence
  siRNA sense strand against b2GPI
uaacacuggguuuuaucugaa

SEQ ID NO: 4232 - RNA, 21 nt, Artificial Sequence
  siRNA sense strand against b2GPI
aacacuggguuuuaucugaau

SEQ ID NO: 4233 - RNA, 21 nt, Artificial Sequence
  siRNA sense strand against b2GPI
cacuggguuuuaucugaaugg

SEQ ID NO: 4234 - RNA, 21 nt, Artificial Sequence
  siRNA sense strand against b2GPI
cuggguuuuaucugaauggcg

SEQ ID NO: 4235 - RNA, 21 nt, Artificial Sequence
  siRNA sense strand against b2GPI
uggguuuuaucugaauggcgc

SEQ ID NO: 4236 - RNA, 21 nt, Artificial Sequence
  siRNA sense strand against b2GPI
ggguuuuaucugaauggcgcu

SEQ ID NO: 4237 - RNA, 21 nt, Artificial Sequence
  siRNA sense strand against b2GPI
uuuuaucugaauggcgcugau

SEQ ID NO: 4238 - RNA, 21 nt, Artificial Sequence
  siRNA sense strand against b2GPI
uaucugaauggcgcugauucu

SEQ ID NO: 4239 - RNA, 21 nt, Artificial Sequence
  siRNA sense strand against b2GPI
ugaauggcgcugauucugcca

SEQ ID NO: 4240 - RNA, 21 nt, Artificial Sequence
  siRNA sense strand against b2GPI
auggcgcugauucugccaagu

SEQ ID NO: 4241 - RNA, 21 nt, Artificial Sequence
  siRNA sense strand against b2GPI
uggcgcugauucugccaagug

SEQ ID NO: 4242 - RNA, 21 nt, Artificial Sequence
  siRNA sense strand against b2GPI
ggcgcugauucugccaagugc

SEQ ID NO: 4243 - RNA, 21 nt, Artificial Sequence
  siRNA sense strand against b2GPI
gcgcugauucugccaagugca

SEQ ID NO: 4244 - RNA, 21 nt, Artificial Sequence
  siRNA sense strand against b2GPI
cgcugauucugccaagugcac

SEQ ID NO: 4245 - RNA, 21 nt, Artificial Sequence
  siRNA sense strand against b2GPI
gcugauucugccaagugcacu

SEQ ID NO: 4246 - RNA, 21 nt, Artificial Sequence
  siRNA sense strand against b2GPI
cugauucugccaagugcacug

SEQ ID NO: 4247 - RNA, 21 nt, Artificial Sequence
  siRNA sense strand against b2GPI
uucugccaagugcacugagga

SEQ ID NO: 4248 - RNA, 21 nt, Artificial Sequence
  siRNA sense strand against b2GPI
ucugccaagugcacugaggaa

SEQ ID NO: 4249 - RNA, 21 nt, Artificial Sequence
  siRNA sense strand against b2GPI
ugccaagugcacugaggaagg

SEQ ID NO: 4250 - RNA, 21 nt, Artificial Sequence
  siRNA sense strand against b2GPI
gccaagugcacugaggaagga

SEQ ID NO: 4251 - RNA, 21 nt, Artificial Sequence
  siRNA sense strand against b2GPI
ccaagugcacugaggaaggaa

SEQ ID NO: 4252 - RNA, 21 nt, Artificial Sequence
  siRNA sense strand against b2GPI
caagugcacugaggaaggaaa

SEQ ID NO: 4253 - RNA, 21 nt, Artificial Sequence
  siRNA sense strand against b2GPI
aagugcacugaggaaggaaaa

SEQ ID NO: 4254 - RNA, 21 nt, Artificial Sequence
  siRNA sense strand against b2GPI
agugcacugaggaaggaaaau

SEQ ID NO: 4255 - RNA, 21 nt, Artificial Sequence
  siRNA sense strand against b2GPI
aggaaggaaaauggagcccgg

SEQ ID NO: 4256 - RNA, 21 nt, Artificial Sequence
  siRNA sense strand against b2GPI
gagcccggagcuuccugucug

SEQ ID NO: 4257 - RNA, 21 nt, Artificial Sequence
  siRNA sense strand against b2GPI
agcccggagcuuccugucugu

SEQ ID NO: 4258 - RNA, 21 nt, Artificial Sequence
  siRNA sense strand against b2GPI
ccggagcuuccugucugugcu

SEQ ID NO: 4259 - RNA, 21 nt, Artificial Sequence
  siRNA sense strand against b2GPI
cggagcuuccugucugugcuc

SEQ ID NO: 4260 - RNA, 21 nt, Artificial Sequence
  siRNA sense strand against b2GPI
agcuuccugucugugcuccca

SEQ ID NO: 4261 - RNA, 21 nt, Artificial Sequence
  siRNA sense strand against b2GPI
uccugucugugcucccaucau

SEQ ID NO: 4262 - RNA, 21 nt, Artificial Sequence
  siRNA sense strand against b2GPI
cugucugugcucccaucaucu

SEQ ID NO: 4263 - RNA, 21 nt, Artificial Sequence
  siRNA sense strand against b2GPI
cucccaucaucugcccuccac

SEQ ID NO: 4264 - RNA, 21 nt, Artificial Sequence
  siRNA sense strand against b2GPI
ccaucaucugcccuccaccau

SEQ ID NO: 4265 - RNA, 21 nt, Artificial Sequence
  siRNA sense strand against b2GPI
caucaucugcccuccaccauc

SEQ ID NO: 4266 - RNA, 21 nt, Artificial Sequence
  siRNA sense strand against b2GPI
aucugcccuccaccauccaua

SEQ ID NO: 4267 - RNA, 21 nt, Artificial Sequence
  siRNA sense strand against b2GPI
gcccuccaccauccauaccua

SEQ ID NO: 4268 - RNA, 21 nt, Artificial Sequence
  siRNA sense strand against b2GPI
cuccaccauccauaccuacgu

SEQ ID NO: 4269 - RNA, 21 nt, Artificial Sequence
  siRNA sense strand against b2GPI
uccaccauccauaccuacguu

SEQ ID NO: 4270 - RNA, 21 nt, Artificial Sequence
  siRNA sense strand against b2GPI
ccaccauccauaccuacguuu

SEQ ID NO: 4271 - RNA, 21 nt, Artificial Sequence
  siRNA sense strand against b2GPI
caccauccauaccuacguuug

SEQ ID NO: 4272 - RNA, 21 nt, Artificial Sequence
  siRNA sense strand against b2GPI
accauccauaccuacguuugc

SEQ ID NO: 4273 - RNA, 21 nt, Artificial Sequence
  siRNA sense strand against b2GPI
ccauccauaccuacguuugca

SEQ ID NO: 4274 - RNA, 21 nt, Artificial Sequence
  siRNA sense strand against b2GPI
cauccauaccuacguuugcaa

SEQ ID NO: 4275 - RNA, 21 nt, Artificial Sequence
  siRNA sense strand against b2GPI
uccauaccuacguuugcaaca

SEQ ID NO: 4276 - RNA, 21 nt, Artificial Sequence
  siRNA sense strand against b2GPI
auaccuacguuugcaacacuu

SEQ ID NO: 4277 - RNA, 21 nt, Artificial Sequence
  siRNA sense strand against b2GPI
uaccuacguuugcaacacuuc

SEQ ID NO: 4278 - RNA, 21 nt, Artificial Sequence
  siRNA sense strand against b2GPI
accuacguuugcaacacuucg

SEQ ID NO: 4279 - RNA, 21 nt, Artificial Sequence
  siRNA sense strand against b2GPI
ccuacguuugcaacacuucgu

SEQ ID NO: 4280 - RNA, 21 nt, Artificial Sequence
  siRNA sense strand against b2GPI
cuacguuugcaacacuucgug

SEQ ID NO: 4281 - RNA, 21 nt, Artificial Sequence
  siRNA sense strand against b2GPI
uacguuugcaacacuucgugu

SEQ ID NO: 4282 - RNA, 21 nt, Artificial Sequence
  siRNA sense strand against b2GPI
acguuugcaacacuucguguu

SEQ ID NO: 4283 - RNA, 21 nt, Artificial Sequence
  siRNA sense strand against b2GPI
cguuugcaacacuucguguuu

SEQ ID NO: 4284 - RNA, 21 nt, Artificial Sequence
  siRNA sense strand against b2GPI
guuugcaacacuucguguuua

SEQ ID NO: 4285 - RNA, 21 nt, Artificial Sequence
  siRNA sense strand against b2GPI
uuugcaacacuucguguuuau

SEQ ID NO: 4286 - RNA, 21 nt, Artificial Sequence
  siRNA sense strand against b2GPI
uugcaacacuucguguuuaua

SEQ ID NO: 4287 - RNA, 21 nt, Artificial Sequence
  siRNA sense strand against b2GPI
ugcaacacuucguguuuauaa

SEQ ID NO: 4288 - RNA, 21 nt, Artificial Sequence
  siRNA sense strand against b2GPI
gcaacacuucguguuuauaag

SEQ ID NO: 4289 - RNA, 21 nt, Artificial Sequence
  siRNA sense strand against b2GPI
acacuucguguuuauaagcca

SEQ ID NO: 4290 - RNA, 21 nt, Artificial Sequence
  siRNA sense strand against b2GPI
cacuucguguuuauaagccau

SEQ ID NO: 4291 - RNA, 21 nt, Artificial Sequence
  siRNA sense strand against b2GPI
ucguguuuauaagccaucagc

SEQ ID NO: 4292 - RNA, 21 nt, Artificial Sequence
  siRNA sense strand against b2GPI
cguguuuauaagccaucagcu

SEQ ID NO: 4293 - RNA, 21 nt, Artificial Sequence
  siRNA sense strand against b2GPI
guguuuauaagccaucagcug

SEQ ID NO: 4294 - RNA, 21 nt, Artificial Sequence
  siRNA sense strand against b2GPI
auaagccaucagcuggaaaca

SEQ ID NO: 4295 - RNA, 21 nt, Artificial Sequence
  siRNA sense strand against b2GPI
uaagccaucagcuggaaacaa

SEQ ID NO: 4296 - RNA, 21 nt, Artificial Sequence
  siRNA sense strand against b2GPI
aagccaucagcuggaaacaau

SEQ ID NO: 4297 - RNA, 21 nt, Artificial Sequence
  siRNA sense strand against b2GPI
agccaucagcuggaaacaauu

SEQ ID NO: 4298 - RNA, 21 nt, Artificial Sequence
  siRNA sense strand against b2GPI
gccaucagcuggaaacaauuc

SEQ ID NO: 4299 - RNA, 21 nt, Artificial Sequence
  siRNA sense strand against b2GPI
ucagcuggaaacaauucccuc

SEQ ID NO: 4300 - RNA, 21 nt, Artificial Sequence
  siRNA sense strand against b2GPI
cagcuggaaacaauucccucu

SEQ ID NO: 4301 - RNA, 21 nt, Artificial Sequence
  siRNA sense strand against b2GPI
cuggaaacaauucccucuauc

SEQ ID NO: 4302 - RNA, 21 nt, Artificial Sequence
  siRNA sense strand against b2GPI
aaacaauucccucuaucggga

SEQ ID NO: 4303 - RNA, 21 nt, Artificial Sequence
  siRNA sense strand against b2GPI
ucccucuaucgggacacagca

SEQ ID NO: 4304 - RNA, 21 nt, Artificial Sequence
  siRNA sense strand against b2GPI
cucuaucgggacacagcaguu

SEQ ID NO: 4305 - RNA, 21 nt, Artificial Sequence
  siRNA sense strand against b2GPI
ucuaucgggacacagcaguuu

SEQ ID NO: 4306 - RNA, 21 nt, Artificial Sequence
  siRNA sense strand against b2GPI
cuaucgggacacagcaguuuu

SEQ ID NO: 4307 - RNA, 21 nt, Artificial Sequence
  siRNA sense strand against b2GPI
uaucgggacacagcaguuuuu

SEQ ID NO: 4308 - RNA, 21 nt, Artificial Sequence
  siRNA sense strand against b2GPI
ucgggacacagcaguuuuuga

SEQ ID NO: 4309 - RNA, 21 nt, Artificial Sequence
  siRNA sense strand against b2GPI
cgggacacagcaguuuuugaa

SEQ ID NO: 4310 - RNA, 21 nt, Artificial Sequence
  siRNA sense strand against b2GPI
gggacacagcaguuuuugaau

SEQ ID NO: 4311 - RNA, 21 nt, Artificial Sequence
  siRNA sense strand against b2GPI
gacacagcaguuuuugaaugu

SEQ ID NO: 4312 - RNA, 21 nt, Artificial Sequence
  siRNA sense strand against b2GPI
acacagcaguuuuugaauguu

SEQ ID NO: 4313 - RNA, 21 nt, Artificial Sequence
  siRNA sense strand against b2GPI
cacagcaguuuuugaauguuu

SEQ ID NO: 4314 - RNA, 21 nt, Artificial Sequence
  siRNA sense strand against b2GPI
acagcaguuuuugaauguuug

SEQ ID NO: 4315 - RNA, 21 nt, Artificial Sequence
  siRNA sense strand against b2GPI
cagcaguuuuugaauguuugc

SEQ ID NO: 4316 - RNA, 21 nt, Artificial Sequence
  siRNA sense strand against b2GPI
gcaguuuuugaauguuugcca

SEQ ID NO: 4317 - RNA, 21 nt, Artificial Sequence
  siRNA sense strand against b2GPI
caguuuuugaauguuugccac

SEQ ID NO: 4318 - RNA, 21 nt, Artificial Sequence
  siRNA sense strand against b2GPI
guuuuugaauguuugccacaa

SEQ ID NO: 4319 - RNA, 21 nt, Artificial Sequence
  siRNA sense strand against b2GPI
uuuugaauguuugccacaaca

SEQ ID NO: 4320 - RNA, 21 nt, Artificial Sequence
  siRNA sense strand against b2GPI
uuugaauguuugccacaacau

SEQ ID NO: 4321 - RNA, 21 nt, Artificial Sequence
  siRNA sense strand against b2GPI
uugaauguuugccacaacaug

SEQ ID NO: 4322 - RNA, 21 nt, Artificial Sequence
  siRNA sense strand against b2GPI
auguuugccacaacaugcgau

SEQ ID NO: 4323 - RNA, 21 nt, Artificial Sequence
  siRNA sense strand against b2GPI
uugccacaacaugcgauguuu

SEQ ID NO: 4324 - RNA, 21 nt, Artificial Sequence
  siRNA sense strand against b2GPI
ugccacaacaugcgauguuug

SEQ ID NO: 4325 - RNA, 21 nt, Artificial Sequence
  siRNA sense strand against b2GPI
ccacaacaugcgauguuugga

SEQ ID NO: 4326 - RNA, 21 nt, Artificial Sequence
  siRNA sense strand against b2GPI
cacaacaugcgauguuuggaa

SEQ ID NO: 4327 - RNA, 21 nt, Artificial Sequence
  siRNA sense strand against b2GPI
caacaugcgauguuuggaaau

SEQ ID NO: 4328 - RNA, 21 nt, Artificial Sequence
  siRNA sense strand against b2GPI
acaugcgauguuuggaaauga

SEQ ID NO: 4329 - RNA, 21 nt, Artificial Sequence
  siRNA sense strand against b2GPI
caugcgauguuuggaaaugau

SEQ ID NO: 4330 - RNA, 21 nt, Artificial Sequence
  siRNA sense strand against b2GPI
augcgauguuuggaaaugaua

SEQ ID NO: 4331 - RNA, 21 nt, Artificial Sequence
  siRNA sense strand against b2GPI
ugcgauguuuggaaaugauac

SEQ ID NO: 4332 - RNA, 21 nt, Artificial Sequence
  siRNA sense strand against b2GPI
gcgauguuuggaaaugauaca

SEQ ID NO: 4333 - RNA, 21 nt, Artificial Sequence
  siRNA sense strand against b2GPI
cgauguuuggaaaugauacaa

SEQ ID NO: 4334 - RNA, 21 nt, Artificial Sequence
  siRNA sense strand against b2GPI
auguuuggaaaugauacaauu

SEQ ID NO: 4335 - RNA, 21 nt, Artificial Sequence
  siRNA sense strand against b2GPI
uguuuggaaaugauacaauua

SEQ ID NO: 4336 - RNA, 21 nt, Artificial Sequence
  siRNA sense strand against b2GPI
uuggaaaugauacaauuaccu

SEQ ID NO: 4337 - RNA, 21 nt, Artificial Sequence
  siRNA sense strand against b2GPI
augauacaauuaccugcacga

SEQ ID NO: 4338 - RNA, 21 nt, Artificial Sequence
  siRNA sense strand against b2GPI
gauacaauuaccugcacgaca

SEQ ID NO: 4339 - RNA, 21 nt, Artificial Sequence
  siRNA sense strand against b2GPI
auacaauuaccugcacgacac

SEQ ID NO: 4340 - RNA, 21 nt, Artificial Sequence
  siRNA sense strand against b2GPI
uacaauuaccugcacgacaca

SEQ ID NO: 4341 - RNA, 21 nt, Artificial Sequence
  siRNA sense strand against b2GPI
acaauuaccugcacgacacau

SEQ ID NO: 4342 - RNA, 21 nt, Artificial Sequence
  siRNA sense strand against b2GPI
uuaccugcacgacacauggaa

SEQ ID NO: 4343 - RNA, 21 nt, Artificial Sequence
  siRNA sense strand against b2GPI
uaccugcacgacacauggaaa

SEQ ID NO: 4344 - RNA, 21 nt, Artificial Sequence
  siRNA sense strand against b2GPI
accugcacgacacauggaaau

SEQ ID NO: 4345 - RNA, 21 nt, Artificial Sequence
  siRNA sense strand against b2GPI
gcacgacacauggaaauugga

SEQ ID NO: 4346 - RNA, 21 nt, Artificial Sequence
  siRNA sense strand against b2GPI
acgacacauggaaauuggacu

SEQ ID NO: 4347 - RNA, 21 nt, Artificial Sequence
  siRNA sense strand against b2GPI
cgacacauggaaauuggacua

SEQ ID NO: 4348 - RNA, 21 nt, Artificial Sequence
  siRNA sense strand against b2GPI
acacauggaaauuggacuaaa

SEQ ID NO: 4349 - RNA, 21 nt, Artificial Sequence
  siRNA sense strand against b2GPI
cacauggaaauuggacuaaau

SEQ ID NO: 4350 - RNA, 21 nt, Artificial Sequence
  siRNA sense strand against b2GPI
acauggaaauuggacuaaauu

SEQ ID NO: 4351 - RNA, 21 nt, Artificial Sequence
  siRNA sense strand against b2GPI
cauggaaauuggacuaaauua

SEQ ID NO: 4352 - RNA, 21 nt, Artificial Sequence
  siRNA sense strand against b2GPI
auggaaauuggacuaaauuac

SEQ ID NO: 4353 - RNA, 21 nt, Artificial Sequence
  siRNA sense strand against b2GPI
ggaaauuggacuaaauuacca

SEQ ID NO: 4354 - RNA, 21 nt, Artificial Sequence
  siRNA sense strand against b2GPI
uuggacuaaauuaccagaaug

SEQ ID NO: 4355 - RNA, 21 nt, Artificial Sequence
  siRNA sense strand against b2GPI
uaccagaaugcagggaaguaa

SEQ ID NO: 4356 - RNA, 21 nt, Artificial Sequence
  siRNA sense strand against b2GPI
accagaaugcagggaaguaaa

SEQ ID NO: 4357 - RNA, 21 nt, Artificial Sequence
  siRNA sense strand against b2GPI
ccagaaugcagggaaguaaaa

SEQ ID NO: 4358 - RNA, 21 nt, Artificial Sequence
  siRNA sense strand against b2GPI
cagaaugcagggaaguaaaau

SEQ ID NO: 4359 - RNA, 21 nt, Artificial Sequence
  siRNA sense strand against b2GPI
agaaugcagggaaguaaaaug

SEQ ID NO: 4360 - RNA, 21 nt, Artificial Sequence
  siRNA sense strand against b2GPI
ugcagggaaguaaaaugccca

SEQ ID NO: 4361 - RNA, 21 nt, Artificial Sequence
  siRNA sense strand against b2GPI
gggaaguaaaaugcccauucc

SEQ ID NO: 4362 - RNA, 21 nt, Artificial Sequence
  siRNA sense strand against b2GPI
aaguaaaaugcccauucccau

SEQ ID NO: 4363 - RNA, 21 nt, Artificial Sequence
  siRNA sense strand against b2GPI
aaaugcccauucccaucaaga

SEQ ID NO: 4364 - RNA, 21 nt, Artificial Sequence
  siRNA sense strand against b2GPI
aaugcccauucccaucaagac

SEQ ID NO: 4365 - RNA, 21 nt, Artificial Sequence
  siRNA sense strand against b2GPI
ugcccauucccaucaagacca

SEQ ID NO: 4366 - RNA, 21 nt, Artificial Sequence
  siRNA sense strand against b2GPI
gcccauucccaucaagaccag

SEQ ID NO: 4367 - RNA, 21 nt, Artificial Sequence
  siRNA sense strand against b2GPI
cccauucccaucaagaccaga

SEQ ID NO: 4368 - RNA, 21 nt, Artificial Sequence
  siRNA sense strand against b2GPI
uucccaucaagaccagacaau

SEQ ID NO: 4369 - RNA, 21 nt, Artificial Sequence
  siRNA sense strand against b2GPI
ucccaucaagaccagacaaug

SEQ ID NO: 4370 - RNA, 21 nt, Artificial Sequence
  siRNA sense strand against b2GPI
cccaucaagaccagacaaugg

SEQ ID NO: 4371 - RNA, 21 nt, Artificial Sequence
  siRNA sense strand against b2GPI
ccaucaagaccagacaaugga

SEQ ID NO: 4372 - RNA, 21 nt, Artificial Sequence
  siRNA sense strand against b2GPI
caucaagaccagacaauggau

SEQ ID NO: 4373 - RNA, 21 nt, Artificial Sequence
  siRNA sense strand against b2GPI
aucaagaccagacaauggauu

SEQ ID NO: 4374 - RNA, 21 nt, Artificial Sequence
  siRNA sense strand against b2GPI
ucaagaccagacaauggauuu

SEQ ID NO: 4375 - RNA, 21 nt, Artificial Sequence
  siRNA sense strand against b2GPI
caagaccagacaauggauuug

SEQ ID NO: 4376 - RNA, 21 nt, Artificial Sequence
  siRNA sense strand against b2GPI
agaccagacaauggauuugug

SEQ ID NO: 4377 - RNA, 21 nt, Artificial Sequence
  siRNA sense strand against b2GPI
gaccagacaauggauuuguga

SEQ ID NO: 4378 - RNA, 21 nt, Artificial Sequence
  siRNA sense strand against b2GPI
accagacaauggauuugugaa

SEQ ID NO: 4379 - RNA, 21 nt, Artificial Sequence
  siRNA sense strand against b2GPI
ccagacaauggauuugugaac

SEQ ID NO: 4380 - RNA, 21 nt, Artificial Sequence
  siRNA sense strand against b2GPI
agacaauggauuugugaacua

SEQ ID NO: 4381 - RNA, 21 nt, Artificial Sequence
  siRNA sense strand against b2GPI
gacaauggauuugugaacuau

SEQ ID NO: 4382 - RNA, 21 nt, Artificial Sequence
  siRNA sense strand against b2GPI
acaauggauuugugaacuauc

SEQ ID NO: 4383 - RNA, 21 nt, Artificial Sequence
  siRNA sense strand against b2GPI
auggauuugugaacuauccug

SEQ ID NO: 4384 - RNA, 21 nt, Artificial Sequence
  siRNA sense strand against b2GPI
ggauuugugaacuauccugca

SEQ ID NO: 4385 - RNA, 21 nt, Artificial Sequence
  siRNA sense strand against b2GPI
gauuugugaacuauccugcaa

SEQ ID NO: 4386 - RNA, 21 nt, Artificial Sequence
  siRNA sense strand against b2GPI
auuugugaacuauccugcaaa

SEQ ID NO: 4387 - RNA, 21 nt, Artificial Sequence
  siRNA sense strand against b2GPI
uuugugaacuauccugcaaaa

SEQ ID NO: 4388 - RNA, 21 nt, Artificial Sequence
  siRNA sense strand against b2GPI
gugaacuauccugcaaaacca

SEQ ID NO: 4389 - RNA, 21 nt, Artificial Sequence
  siRNA sense strand against b2GPI
ugaacuauccugcaaaaccaa

SEQ ID NO: 4390 - RNA, 21 nt, Artificial Sequence
  siRNA sense strand against b2GPI
aacuauccugcaaaaccaaca

SEQ ID NO: 4391 - RNA, 21 nt, Artificial Sequence
  siRNA sense strand against b2GPI
acuauccugcaaaaccaacac

SEQ ID NO: 4392 - RNA, 21 nt, Artificial Sequence
  siRNA sense strand against b2GPI
uauccugcaaaaccaacacuu

SEQ ID NO: 4393 - RNA, 21 nt, Artificial Sequence
  siRNA sense strand against b2GPI
auccugcaaaaccaacacuuu

SEQ ID NO: 4394 - RNA, 21 nt, Artificial Sequence
  siRNA sense strand against b2GPI
uccugcaaaaccaacacuuua

SEQ ID NO: 4395 - RNA, 21 nt, Artificial Sequence
  siRNA sense strand against b2GPI
ccugcaaaaccaacacuuuau

SEQ ID NO: 4396 - RNA, 21 nt, Artificial Sequence
  siRNA sense strand against b2GPI
cugcaaaaccaacacuuuauu

SEQ ID NO: 4397 - RNA, 21 nt, Artificial Sequence
  siRNA sense strand against b2GPI
ugcaaaaccaacacuuuauua

SEQ ID NO: 4398 - RNA, 21 nt, Artificial Sequence
  siRNA sense strand against b2GPI
caaaaccaacacuuuauuaca

SEQ ID NO: 4399 - RNA, 21 nt, Artificial Sequence
  siRNA sense strand against b2GPI
aaaaccaacacuuuauuacaa

SEQ ID NO: 4400 - RNA, 21 nt, Artificial Sequence
  siRNA sense strand against b2GPI
aaccaacacuuuauuacaagg

SEQ ID NO: 4401 - RNA, 21 nt, Artificial Sequence
  siRNA sense strand against b2GPI
ccaacacuuuauuacaaggau

SEQ ID NO: 4402 - RNA, 21 nt, Artificial Sequence
  siRNA sense strand against b2GPI
caacacuuuauuacaaggaua

SEQ ID NO: 4403 - RNA, 21 nt, Artificial Sequence
  siRNA sense strand against b2GPI
aacacuuuauuacaaggauaa

SEQ ID NO: 4404 - RNA, 21 nt, Artificial Sequence
  siRNA sense strand against b2GPI
uacaaggauaaagccacauuu

SEQ ID NO: 4405 - RNA, 21 nt, Artificial Sequence
  siRNA sense strand against b2GPI
caaggauaaagccacauuugg

SEQ ID NO: 4406 - RNA, 21 nt, Artificial Sequence
  siRNA sense strand against b2GPI
aggauaaagccacauuuggcu

SEQ ID NO: 4407 - RNA, 21 nt, Artificial Sequence
  siRNA sense strand against b2GPI
uaaagccacauuuggcugcca

SEQ ID NO: 4408 - RNA, 21 nt, Artificial Sequence
  siRNA sense strand against b2GPI
aaagccacauuuggcugccau

SEQ ID NO: 4409 - RNA, 21 nt, Artificial Sequence
  siRNA sense strand against b2GPI
aagccacauuuggcugccaug

SEQ ID NO: 4410 - RNA, 21 nt, Artificial Sequence
  siRNA sense strand against b2GPI
agccacauuuggcugccauga

SEQ ID NO: 4411 - RNA, 21 nt, Artificial Sequence
  siRNA sense strand against b2GPI
gccacauuuggcugccaugau

SEQ ID NO: 4412 - RNA, 21 nt, Artificial Sequence
  siRNA sense strand against b2GPI
ccacauuuggcugccaugaug

SEQ ID NO: 4413 - RNA, 21 nt, Artificial Sequence
  siRNA sense strand against b2GPI
cacauuuggcugccaugaugg

SEQ ID NO: 4414 - RNA, 21 nt, Artificial Sequence
  siRNA sense strand against b2GPI
acauuuggcugccaugaugga

SEQ ID NO: 4415 - RNA, 21 nt, Artificial Sequence
  siRNA sense strand against b2GPI
uuuggcugccaugauggauau

SEQ ID NO: 4416 - RNA, 21 nt, Artificial Sequence
  siRNA sense strand against b2GPI
uuggcugccaugauggauauu

SEQ ID NO: 4417 - RNA, 21 nt, Artificial Sequence
  siRNA sense strand against b2GPI
ggcugccaugauggauauucu

SEQ ID NO: 4418 - RNA, 21 nt, Artificial Sequence
  siRNA sense strand against b2GPI
gcugccaugauggauauucuc

SEQ ID NO: 4419 - RNA, 21 nt, Artificial Sequence
  siRNA sense strand against b2GPI
ugccaugauggauauucucug

SEQ ID NO: 4420 - RNA, 21 nt, Artificial Sequence
  siRNA sense strand against b2GPI
gccaugauggauauucucugg

SEQ ID NO: 4421 - RNA, 21 nt, Artificial Sequence
  siRNA sense strand against b2GPI
caugauggauauucucuggau

SEQ ID NO: 4422 - RNA, 21 nt, Artificial Sequence
  siRNA sense strand against b2GPI
augauggauauucucuggaug

SEQ ID NO: 4423 - RNA, 21 nt, Artificial Sequence
  siRNA sense strand against b2GPI
auggauauucucuggauggcc

SEQ ID NO: 4424 - RNA, 21 nt, Artificial Sequence
  siRNA sense strand against b2GPI
uauucucuggauggcccggaa

SEQ ID NO: 4425 - RNA, 21 nt, Artificial Sequence
  siRNA sense strand against b2GPI
uucucuggauggcccggaaga

SEQ ID NO: 4426 - RNA, 21 nt, Artificial Sequence
  siRNA sense strand against b2GPI
ucucuggauggcccggaagaa

SEQ ID NO: 4427 - RNA, 21 nt, Artificial Sequence
  siRNA sense strand against b2GPI
cucuggauggcccggaagaaa

SEQ ID NO: 4428 - RNA, 21 nt, Artificial Sequence
  siRNA sense strand against b2GPI
ucuggauggcccggaagaaau

SEQ ID NO: 4429 - RNA, 21 nt, Artificial Sequence
  siRNA sense strand against b2GPI
cuggauggcccggaagaaaua

SEQ ID NO: 4430 - RNA, 21 nt, Artificial Sequence
  siRNA sense strand against b2GPI
ggauggcccggaagaaauaga

SEQ ID NO: 4431 - RNA, 21 nt, Artificial Sequence
  siRNA sense strand against b2GPI
gauggcccggaagaaauagaa

SEQ ID NO: 4432 - RNA, 21 nt, Artificial Sequence
  siRNA sense strand against b2GPI
auggcccggaagaaauagaau

SEQ ID NO: 4433 - RNA, 21 nt, Artificial Sequence
  siRNA sense strand against b2GPI
uggcccggaagaaauagaaug

SEQ ID NO: 4434 - RNA, 21 nt, Artificial Sequence
  siRNA sense strand against b2GPI
ggcccggaagaaauagaaugu

SEQ ID NO: 4435 - RNA, 21 nt, Artificial Sequence
  siRNA sense strand against b2GPI
cccggaagaaauagaauguac

SEQ ID NO: 4436 - RNA, 21 nt, Artificial Sequence
  siRNA sense strand against b2GPI
ccggaagaaauagaauguacc

SEQ ID NO: 4437 - RNA, 21 nt, Artificial Sequence
  siRNA sense strand against b2GPI
cggaagaaauagaauguacca

SEQ ID NO: 4438 - RNA, 21 nt, Artificial Sequence
  siRNA sense strand against b2GPI
aagaaauagaauguaccaaac

SEQ ID NO: 4439 - RNA, 21 nt, Artificial Sequence
  siRNA sense strand against b2GPI
auagaauguaccaaacuggga

SEQ ID NO: 4440 - RNA, 21 nt, Artificial Sequence
  siRNA sense strand against b2GPI
uagaauguaccaaacugggaa

SEQ ID NO: 4441 - RNA, 21 nt, Artificial Sequence
  siRNA sense strand against b2GPI
agaauguaccaaacugggaaa

SEQ ID NO: 4442 - RNA, 21 nt, Artificial Sequence
  siRNA sense strand against b2GPI
auguaccaaacugggaaacug

SEQ ID NO: 4443 - RNA, 21 nt, Artificial Sequence
  siRNA sense strand against b2GPI
accaaacugggaaacuggucu

SEQ ID NO: 4444 - RNA, 21 nt, Artificial Sequence
  siRNA sense strand against b2GPI
ccaaacugggaaacuggucug

SEQ ID NO: 4445 - RNA, 21 nt, Artificial Sequence
  siRNA sense strand against b2GPI
aacugggaaacuggucugcca

SEQ ID NO: 4446 - RNA, 21 nt, Artificial Sequence
  siRNA sense strand against b2GPI
acugggaaacuggucugccau

SEQ ID NO: 4447 - RNA, 21 nt, Artificial Sequence
  siRNA sense strand against b2GPI
cugggaaacuggucugccaug

SEQ ID NO: 4448 - RNA, 21 nt, Artificial Sequence
  siRNA sense strand against b2GPI
ugggaaacuggucugccaugc

SEQ ID NO: 4449 - RNA, 21 nt, Artificial Sequence
  siRNA sense strand against b2GPI
ggaaacuggucugccaugcca

SEQ ID NO: 4450 - RNA, 21 nt, Artificial Sequence
  siRNA sense strand against b2GPI
gaaacuggucugccaugccaa

SEQ ID NO: 4451 - RNA, 21 nt, Artificial Sequence
  siRNA sense strand against b2GPI
aaacuggucugccaugccaag

SEQ ID NO: 4452 - RNA, 21 nt, Artificial Sequence
  siRNA sense strand against b2GPI
aacuggucugccaugccaagu

SEQ ID NO: 4453 - RNA, 21 nt, Artificial Sequence
  siRNA sense strand against b2GPI
acuggucugccaugccaaguu

SEQ ID NO: 4454 - RNA, 21 nt, Artificial Sequence
  siRNA sense strand against b2GPI
cuggucugccaugccaaguug

SEQ ID NO: 4455 - RNA, 21 nt, Artificial Sequence
  siRNA sense strand against b2GPI
uggucugccaugccaaguugu

SEQ ID NO: 4456 - RNA, 21 nt, Artificial Sequence
  siRNA sense strand against b2GPI
ggucugccaugccaaguugua

SEQ ID NO: 4457 - RNA, 21 nt, Artificial Sequence
  siRNA sense strand against b2GPI
gucugccaugccaaguuguaa

SEQ ID NO: 4458 - RNA, 21 nt, Artificial Sequence
  siRNA sense strand against b2GPI
ucugccaugccaaguuguaaa

SEQ ID NO: 4459 - RNA, 21 nt, Artificial Sequence
  siRNA sense strand against b2GPI
cugccaugccaaguuguaaag

SEQ ID NO: 4460 - RNA, 21 nt, Artificial Sequence
  siRNA sense strand against b2GPI
gccaugccaaguuguaaagca

SEQ ID NO: 4461 - RNA, 21 nt, Artificial Sequence
  siRNA sense strand against b2GPI
ccaugccaaguuguaaagcau

SEQ ID NO: 4462 - RNA, 21 nt, Artificial Sequence
  siRNA sense strand against b2GPI
caugccaaguuguaaagcauc

SEQ ID NO: 4463 - RNA, 21 nt, Artificial Sequence
  siRNA sense strand against b2GPI
augccaaguuguaaagcaucu

SEQ ID NO: 4464 - RNA, 21 nt, Artificial Sequence
  siRNA sense strand against b2GPI
ugccaaguuguaaagcaucuu

SEQ ID NO: 4465 - RNA, 21 nt, Artificial Sequence
  siRNA sense strand against b2GPI
gccaaguuguaaagcaucuug

SEQ ID NO: 4466 - RNA, 21 nt, Artificial Sequence
  siRNA sense strand against b2GPI
ccaaguuguaaagcaucuugu

SEQ ID NO: 4467 - RNA, 21 nt, Artificial Sequence
  siRNA sense strand against b2GPI
caaguuguaaagcaucuugua

SEQ ID NO: 4468 - RNA, 21 nt, Artificial Sequence
  siRNA sense strand against b2GPI
aaguuguaaagcaucuuguaa

SEQ ID NO: 4469 - RNA, 21 nt, Artificial Sequence
  siRNA sense strand against b2GPI
aguuguaaagcaucuuguaaa

SEQ ID NO: 4470 - RNA, 21 nt, Artificial Sequence
  siRNA sense strand against b2GPI
guuguaaagcaucuuguaaag

SEQ ID NO: 4471 - RNA, 21 nt, Artificial Sequence
  siRNA sense strand against b2GPI
uguaaagcaucuuguaaagua

SEQ ID NO: 4472 - RNA, 21 nt, Artificial Sequence
  siRNA sense strand against b2GPI
guaaagcaucuuguaaaguac

SEQ ID NO: 4473 - RNA, 21 nt, Artificial Sequence
  siRNA sense strand against b2GPI
aaagcaucuuguaaaguaccu

SEQ ID NO: 4474 - RNA, 21 nt, Artificial Sequence
  siRNA sense strand against b2GPI
agcaucuuguaaaguaccugu

SEQ ID NO: 4475 - RNA, 21 nt, Artificial Sequence
  siRNA sense strand against b2GPI
aucuuguaaaguaccugugaa

SEQ ID NO: 4476 - RNA, 21 nt, Artificial Sequence
  siRNA sense strand against b2GPI
ucuuguaaaguaccugugaaa

SEQ ID NO: 4477 - RNA, 21 nt, Artificial Sequence
  siRNA sense strand against b2GPI
cuuguaaaguaccugugaaaa

SEQ ID NO: 4478 - RNA, 21 nt, Artificial Sequence
  siRNA sense strand against b2GPI
aaaguaccugugaaaaaagcc

SEQ ID NO: 4479 - RNA, 21 nt, Artificial Sequence
  siRNA sense strand against b2GPI
aaguaccugugaaaaaagcca

SEQ ID NO: 4480 - RNA, 21 nt, Artificial Sequence
  siRNA sense strand against b2GPI
aguaccugugaaaaaagccac

SEQ ID NO: 4481 - RNA, 21 nt, Artificial Sequence
  siRNA sense strand against b2GPI
guaccugugaaaaaagccacu

SEQ ID NO: 4482 - RNA, 21 nt, Artificial Sequence
  siRNA sense strand against b2GPI
accugugaaaaaagccacugu

SEQ ID NO: 4483 - RNA, 21 nt, Artificial Sequence
  siRNA sense strand against b2GPI
ccugugaaaaaagccacugug

SEQ ID NO: 4484 - RNA, 21 nt, Artificial Sequence
  siRNA sense strand against b2GPI
cugugaaaaaagccacugugg

SEQ ID NO: 4485 - RNA, 21 nt, Artificial Sequence
  siRNA sense strand against b2GPI
ugugaaaaaagccacuguggu

SEQ ID NO: 4486 - RNA, 21 nt, Artificial Sequence
  siRNA sense strand against b2GPI
gugaaaaaagccacuguggug

SEQ ID NO: 4487 - RNA, 21 nt, Artificial Sequence
  siRNA sense strand against b2GPI
gaaaaaagccacuguggugua

SEQ ID NO: 4488 - RNA, 21 nt, Artificial Sequence
  siRNA sense strand against b2GPI
aaaaaagccacugugguguac

SEQ ID NO: 4489 - RNA, 21 nt, Artificial Sequence
  siRNA sense strand against b2GPI
aaaagccacugugguguacca

SEQ ID NO: 4490 - RNA, 21 nt, Artificial Sequence
  siRNA sense strand against b2GPI
aaagccacugugguguaccaa

SEQ ID NO: 4491 - RNA, 21 nt, Artificial Sequence
  siRNA sense strand against b2GPI
aagccacugugguguaccaag

SEQ ID NO: 4492 - RNA, 21 nt, Artificial Sequence
  siRNA sense strand against b2GPI
gccacugugguguaccaagga

SEQ ID NO: 4493 - RNA, 21 nt, Artificial Sequence
  siRNA sense strand against b2GPI
cacugugguguaccaaggaga

SEQ ID NO: 4494 - RNA, 21 nt, Artificial Sequence
  siRNA sense strand against b2GPI
acugugguguaccaaggagag

SEQ ID NO: 4495 - RNA, 21 nt, Artificial Sequence
  siRNA sense strand against b2GPI
cugugguguaccaaggagaga

SEQ ID NO: 4496 - RNA, 21 nt, Artificial Sequence
  siRNA sense strand against b2GPI
ugugguguaccaaggagagag

SEQ ID NO: 4497 - RNA, 21 nt, Artificial Sequence
  siRNA sense strand against b2GPI
gugguguaccaaggagagaga

SEQ ID NO: 4498 - RNA, 21 nt, Artificial Sequence
  siRNA sense strand against b2GPI
ugguguaccaaggagagagag

SEQ ID NO: 4499 - RNA, 21 nt, Artificial Sequence
  siRNA sense strand against b2GPI
guguaccaaggagagagagua

SEQ ID NO: 4500 - RNA, 21 nt, Artificial Sequence
  siRNA sense strand against b2GPI
uguaccaaggagagagaguaa

SEQ ID NO: 4501 - RNA, 21 nt, Artificial Sequence
  siRNA sense strand against b2GPI
guaccaaggagagagaguaaa

SEQ ID NO: 4502 - RNA, 21 nt, Artificial Sequence
  siRNA sense strand against b2GPI
uaccaaggagagagaguaaag

SEQ ID NO: 4503 - RNA, 21 nt, Artificial Sequence
  siRNA sense strand against b2GPI
accaaggagagagaguaaaga

SEQ ID NO: 4504 - RNA, 21 nt, Artificial Sequence
  siRNA sense strand against b2GPI
ccaaggagagagaguaaagau

SEQ ID NO: 4505 - RNA, 21 nt, Artificial Sequence
  siRNA sense strand against b2GPI
caaggagagagaguaaagauu

SEQ ID NO: 4506 - RNA, 21 nt, Artificial Sequence
  siRNA sense strand against b2GPI
aaggagagagaguaaagauuc

SEQ ID NO: 4507 - RNA, 21 nt, Artificial Sequence
  siRNA sense strand against b2GPI
aggagagagaguaaagauuca

SEQ ID NO: 4508 - RNA, 21 nt, Artificial Sequence
  siRNA sense strand against b2GPI
ggagagagaguaaagauucag

SEQ ID NO: 4509 - RNA, 21 nt, Artificial Sequence
  siRNA sense strand against b2GPI
agagagaguaaagauucagga

SEQ ID NO: 4510 - RNA, 21 nt, Artificial Sequence
  siRNA sense strand against b2GPI
gagagaguaaagauucaggaa

SEQ ID NO: 4511 - RNA, 21 nt, Artificial Sequence
  siRNA sense strand against b2GPI
agagaguaaagauucaggaaa

SEQ ID NO: 4512 - RNA, 21 nt, Artificial Sequence
  siRNA sense strand against b2GPI
gagaguaaagauucaggaaaa

SEQ ID NO: 4513 - RNA, 21 nt, Artificial Sequence
  siRNA sense strand against b2GPI
agaguaaagauucaggaaaaa

SEQ ID NO: 4514 - RNA, 21 nt, Artificial Sequence
  siRNA sense strand against b2GPI
gaguaaagauucaggaaaaau

SEQ ID NO: 4515 - RNA, 21 nt, Artificial Sequence
  siRNA sense strand against b2GPI
aguaaagauucaggaaaaauu

SEQ ID NO: 4516 - RNA, 21 nt, Artificial Sequence
  siRNA sense strand against b2GPI
guaaagauucaggaaaaauuu

SEQ ID NO: 4517 - RNA, 21 nt, Artificial Sequence
  siRNA sense strand against b2GPI
uaaagauucaggaaaaauuua

SEQ ID NO: 4518 - RNA, 21 nt, Artificial Sequence
  siRNA sense strand against b2GPI
aaagauucaggaaaaauuuaa

SEQ ID NO: 4519 - RNA, 21 nt, Artificial Sequence
  siRNA sense strand against b2GPI
ucaggaaaaauuuaagaaugg

SEQ ID NO: 4520 - RNA, 21 nt, Artificial Sequence
  siRNA sense strand against b2GPI
caggaaaaauuuaagaaugga

SEQ ID NO: 4521 - RNA, 21 nt, Artificial Sequence
  siRNA sense strand against b2GPI
aggaaaaauuuaagaauggaa

SEQ ID NO: 4522 - RNA, 21 nt, Artificial Sequence
  siRNA sense strand against b2GPI
aaauuuaagaauggaaugcua

SEQ ID NO: 4523 - RNA, 21 nt, Artificial Sequence
  siRNA sense strand against b2GPI
auuuaagaauggaaugcuaca

SEQ ID NO: 4524 - RNA, 21 nt, Artificial Sequence
  siRNA sense strand against b2GPI
uaagaauggaaugcuacaugg

SEQ ID NO: 4525 - RNA, 21 nt, Artificial Sequence
  siRNA sense strand against b2GPI
aagaauggaaugcuacauggu

SEQ ID NO: 4526 - RNA, 21 nt, Artificial Sequence
  siRNA sense strand against b2GPI
agaauggaaugcuacauggug

SEQ ID NO: 4527 - RNA, 21 nt, Artificial Sequence
  siRNA sense strand against b2GPI
gaauggaaugcuacaugguga

SEQ ID NO: 4528 - RNA, 21 nt, Artificial Sequence
  siRNA sense strand against b2GPI
aauggaaugcuacauggugau

SEQ ID NO: 4529 - RNA, 21 nt, Artificial Sequence
  siRNA sense strand against b2GPI
auggaaugcuacauggugaua

SEQ ID NO: 4530 - RNA, 21 nt, Artificial Sequence
  siRNA sense strand against b2GPI
uggaaugcuacauggugauaa

SEQ ID NO: 4531 - RNA, 21 nt, Artificial Sequence
  siRNA sense strand against b2GPI
ggaaugcuacauggugauaaa

SEQ ID NO: 4532 - RNA, 21 nt, Artificial Sequence
  siRNA sense strand against b2GPI
aaugcuacauggugauaaagu

SEQ ID NO: 4533 - RNA, 21 nt, Artificial Sequence
  siRNA sense strand against b2GPI
augcuacauggugauaaaguu

SEQ ID NO: 4534 - RNA, 21 nt, Artificial Sequence
  siRNA sense strand against b2GPI
ugcuacauggugauaaaguuu

SEQ ID NO: 4535 - RNA, 21 nt, Artificial Sequence
  siRNA sense strand against b2GPI
cuacauggugauaaaguuucu

SEQ ID NO: 4536 - RNA, 21 nt, Artificial Sequence
  siRNA sense strand against b2GPI
acauggugauaaaguuucuuu

SEQ ID NO: 4537 - RNA, 21 nt, Artificial Sequence
  siRNA sense strand against b2GPI
auggugauaaaguuucuuucu

SEQ ID NO: 4538 - RNA, 21 nt, Artificial Sequence
  siRNA sense strand against b2GPI
uggugauaaaguuucuuucuu

SEQ ID NO: 4539 - RNA, 21 nt, Artificial Sequence
  siRNA sense strand against b2GPI
ggugauaaaguuucuuucuuc

SEQ ID NO: 4540 - RNA, 21 nt, Artificial Sequence
  siRNA sense strand against b2GPI
gugauaaaguuucuuucuucu

SEQ ID NO: 4541 - RNA, 21 nt, Artificial Sequence
  siRNA sense strand against b2GPI
auaaaguuucuuucuucugca

SEQ ID NO: 4542 - RNA, 21 nt, Artificial Sequence
  siRNA sense strand against b2GPI
uaaaguuucuuucuucugcaa

SEQ ID NO: 4543 - RNA, 21 nt, Artificial Sequence
  siRNA sense strand against b2GPI
aaaguuucuuucuucugcaaa

SEQ ID NO: 4544 - RNA, 21 nt, Artificial Sequence
  siRNA sense strand against b2GPI
aaguuucuuucuucugcaaaa

SEQ ID NO: 4545 - RNA, 21 nt, Artificial Sequence
  siRNA sense strand against b2GPI
aguuucuuucuucugcaaaaa

SEQ ID NO: 4546 - RNA, 21 nt, Artificial Sequence
  siRNA sense strand against b2GPI
guuucuuucuucugcaaaaau

SEQ ID NO: 4547 - RNA, 21 nt, Artificial Sequence
  siRNA sense strand against b2GPI
uuucuuucuucugcaaaaaua

SEQ ID NO: 4548 - RNA, 21 nt, Artificial Sequence
  siRNA sense strand against b2GPI
uucuuucuucugcaaaaauaa

SEQ ID NO: 4549 - RNA, 21 nt, Artificial Sequence
  siRNA sense strand against b2GPI
ucuuucuucugcaaaaauaag

SEQ ID NO: 4550 - RNA, 21 nt, Artificial Sequence
  siRNA sense strand against b2GPI
cuucugcaaaaauaaggaaaa

SEQ ID NO: 4551 - RNA, 21 nt, Artificial Sequence
  siRNA sense strand against b2GPI
ucugcaaaaauaaggaaaaga

SEQ ID NO: 4552 - RNA, 21 nt, Artificial Sequence
  siRNA sense strand against b2GPI
cugcaaaaauaaggaaaagaa

SEQ ID NO: 4553 - RNA, 21 nt, Artificial Sequence
  siRNA sense strand against b2GPI
ugcaaaaauaaggaaaagaag

SEQ ID NO: 4554 - RNA, 21 nt, Artificial Sequence
  siRNA sense strand against b2GPI
auaaggaaaagaaguguagcu

SEQ ID NO: 4555 - RNA, 21 nt, Artificial Sequence
  siRNA sense strand against b2GPI
uaaggaaaagaaguguagcua

SEQ ID NO: 4556 - RNA, 21 nt, Artificial Sequence
  siRNA sense strand against b2GPI
aaggaaaagaaguguagcuau

SEQ ID NO: 4557 - RNA, 21 nt, Artificial Sequence
  siRNA sense strand against b2GPI
aggaaaagaaguguagcuaua

SEQ ID NO: 4558 - RNA, 21 nt, Artificial Sequence
  siRNA sense strand against b2GPI
gaaaagaaguguagcuauaca

SEQ ID NO: 4559 - RNA, 21 nt, Artificial Sequence
  siRNA sense strand against b2GPI
aagaaguguagcuauacagag

SEQ ID NO: 4560 - RNA, 21 nt, Artificial Sequence
  siRNA sense strand against b2GPI
gaaguguagcuauacagagga

SEQ ID NO: 4561 - RNA, 21 nt, Artificial Sequence
  siRNA sense strand against b2GPI
aaguguagcuauacagaggau

SEQ ID NO: 4562 - RNA, 21 nt, Artificial Sequence
  siRNA sense strand against b2GPI
guguagcuauacagaggaugc

SEQ ID NO: 4563 - RNA, 21 nt, Artificial Sequence
  siRNA sense strand against b2GPI
uguagcuauacagaggaugcu

SEQ ID NO: 4564 - RNA, 21 nt, Artificial Sequence
  siRNA sense strand against b2GPI
uagcuauacagaggaugcuca

SEQ ID NO: 4565 - RNA, 21 nt, Artificial Sequence
  siRNA sense strand against b2GPI
agcuauacagaggaugcucag

SEQ ID NO: 4566 - RNA, 21 nt, Artificial Sequence
  siRNA sense strand against b2GPI
auacagaggaugcucagugua

SEQ ID NO: 4567 - RNA, 21 nt, Artificial Sequence
  siRNA sense strand against b2GPI
acagaggaugcucaguguaua

SEQ ID NO: 4568 - RNA, 21 nt, Artificial Sequence
  siRNA sense strand against b2GPI
cagaggaugcucaguguauag

SEQ ID NO: 4569 - RNA, 21 nt, Artificial Sequence
  siRNA sense strand against b2GPI
agaggaugcucaguguauaga

SEQ ID NO: 4570 - RNA, 21 nt, Artificial Sequence
  siRNA sense strand against b2GPI
gaggaugcucaguguauagau

SEQ ID NO: 4571 - RNA, 21 nt, Artificial Sequence
  siRNA sense strand against b2GPI
aggaugcucaguguauagaug

SEQ ID NO: 4572 - RNA, 21 nt, Artificial Sequence
  siRNA sense strand against b2GPI
gcucaguguauagauggcacu

SEQ ID NO: 4573 - RNA, 21 nt, Artificial Sequence
  siRNA sense strand against b2GPI
cucaguguauagauggcacua

SEQ ID NO: 4574 - RNA, 21 nt, Artificial Sequence
  siRNA sense strand against b2GPI
ucaguguauagauggcacuau

SEQ ID NO: 4575 - RNA, 21 nt, Artificial Sequence
  siRNA sense strand against b2GPI
caguguauagauggcacuauc

SEQ ID NO: 4576 - RNA, 21 nt, Artificial Sequence
  siRNA sense strand against b2GPI
aguguauagauggcacuaucg

SEQ ID NO: 4577 - RNA, 21 nt, Artificial Sequence
  siRNA sense strand against b2GPI
guguauagauggcacuaucga

SEQ ID NO: 4578 - RNA, 21 nt, Artificial Sequence
  siRNA sense strand against b2GPI
uguauagauggcacuaucgaa

SEQ ID NO: 4579 - RNA, 21 nt, Artificial Sequence
  siRNA sense strand against b2GPI
guauagauggcacuaucgaag

SEQ ID NO: 4580 - RNA, 21 nt, Artificial Sequence
  siRNA sense strand against b2GPI
auagauggcacuaucgaaguc

SEQ ID NO: 4581 - RNA, 21 nt, Artificial Sequence
  siRNA sense strand against b2GPI
agauggcacuaucgaaguccc

SEQ ID NO: 4582 - RNA, 21 nt, Artificial Sequence
  siRNA sense strand against b2GPI
auggcacuaucgaagucccca

SEQ ID NO: 4583 - RNA, 21 nt, Artificial Sequence
  siRNA sense strand against b2GPI
uggcacuaucgaaguccccaa

SEQ ID NO: 4584 - RNA, 21 nt, Artificial Sequence
  siRNA sense strand against b2GPI
ggcacuaucgaaguccccaaa

SEQ ID NO: 4585 - RNA, 21 nt, Artificial Sequence
  siRNA sense strand against b2GPI
cacuaucgaaguccccaaaug

SEQ ID NO: 4586 - RNA, 21 nt, Artificial Sequence
  siRNA sense strand against b2GPI
cuaucgaaguccccaaaugcu

SEQ ID NO: 4587 - RNA, 21 nt, Artificial Sequence
  siRNA sense strand against b2GPI
uaucgaaguccccaaaugcuu

SEQ ID NO: 4588 - RNA, 21 nt, Artificial Sequence
  siRNA sense strand against b2GPI
aucgaaguccccaaaugcuuc

SEQ ID NO: 4589 - RNA, 21 nt, Artificial Sequence
  siRNA sense strand against b2GPI
ucgaaguccccaaaugcuuca

SEQ ID NO: 4590 - RNA, 21 nt, Artificial Sequence
  siRNA sense strand against b2GPI
aaguccccaaaugcuucaagg

SEQ ID NO: 4591 - RNA, 21 nt, Artificial Sequence
  siRNA sense strand against b2GPI
aguccccaaaugcuucaagga

SEQ ID NO: 4592 - RNA, 21 nt, Artificial Sequence
  siRNA sense strand against b2GPI
guccccaaaugcuucaaggaa

SEQ ID NO: 4593 - RNA, 21 nt, Artificial Sequence
  siRNA sense strand against b2GPI
uccccaaaugcuucaaggaac

SEQ ID NO: 4594 - RNA, 21 nt, Artificial Sequence
  siRNA sense strand against b2GPI
ccccaaaugcuucaaggaaca

SEQ ID NO: 4595 - RNA, 21 nt, Artificial Sequence
  siRNA sense strand against b2GPI
cccaaaugcuucaaggaacac

SEQ ID NO: 4596 - RNA, 21 nt, Artificial Sequence
  siRNA sense strand against b2GPI
ccaaaugcuucaaggaacaca

SEQ ID NO: 4597 - RNA, 21 nt, Artificial Sequence
  siRNA sense strand against b2GPI
caaaugcuucaaggaacacag

SEQ ID NO: 4598 - RNA, 21 nt, Artificial Sequence
  siRNA sense strand against b2GPI
aaaugcuucaaggaacacagu

SEQ ID NO: 4599 - RNA, 21 nt, Artificial Sequence
  siRNA sense strand against b2GPI
aaugcuucaaggaacacaguu

SEQ ID NO: 4600 - RNA, 21 nt, Artificial Sequence
  siRNA sense strand against b2GPI
augcuucaaggaacacaguuc

SEQ ID NO: 4601 - RNA, 21 nt, Artificial Sequence
  siRNA sense strand against b2GPI
ugcuucaaggaacacaguucu

SEQ ID NO: 4602 - RNA, 21 nt, Artificial Sequence
  siRNA sense strand against b2GPI
cuucaaggaacacaguucucu

SEQ ID NO: 4603 - RNA, 21 nt, Artificial Sequence
  siRNA sense strand against b2GPI
uucaaggaacacaguucucug

SEQ ID NO: 4604 - RNA, 21 nt, Artificial Sequence
  siRNA sense strand against b2GPI
aaggaacacaguucucuggcu

SEQ ID NO: 4605 - RNA, 21 nt, Artificial Sequence
  siRNA sense strand against b2GPI
aggaacacaguucucuggcuu

SEQ ID NO: 4606 - RNA, 21 nt, Artificial Sequence
  siRNA sense strand against b2GPI
ggaacacaguucucuggcuuu

SEQ ID NO: 4607 - RNA, 21 nt, Artificial Sequence
  siRNA sense strand against b2GPI
gaacacaguucucuggcuuuu

SEQ ID NO: 4608 - RNA, 21 nt, Artificial Sequence
  siRNA sense strand against b2GPI
aacacaguucucuggcuuuuu

SEQ ID NO: 4609 - RNA, 21 nt, Artificial Sequence
  siRNA sense strand against b2GPI
acacaguucucuggcuuuuug

SEQ ID NO: 4610 - RNA, 21 nt, Artificial Sequence
  siRNA sense strand against b2GPI
cacaguucucuggcuuuuugg

SEQ ID NO: 4611 - RNA, 21 nt, Artificial Sequence
  siRNA sense strand against b2GPI
acaguucucuggcuuuuugga

SEQ ID NO: 4612 - RNA, 21 nt, Artificial Sequence
  siRNA sense strand against b2GPI
caguucucuggcuuuuuggaa

SEQ ID NO: 4613 - RNA, 21 nt, Artificial Sequence
  siRNA sense strand against b2GPI
aguucucuggcuuuuuggaaa

SEQ ID NO: 4614 - RNA, 21 nt, Artificial Sequence
  siRNA sense strand against b2GPI
guucucuggcuuuuuggaaaa

SEQ ID NO: 4615 - RNA, 21 nt, Artificial Sequence
  siRNA sense strand against b2GPI
cucuggcuuuuuggaaaacug

SEQ ID NO: 4616 - RNA, 21 nt, Artificial Sequence
  siRNA sense strand against b2GPI
ucuggcuuuuuggaaaacuga

SEQ ID NO: 4617 - RNA, 21 nt, Artificial Sequence
  siRNA sense strand against b2GPI
cuggcuuuuuggaaaacugau

SEQ ID NO: 4618 - RNA, 21 nt, Artificial Sequence
  siRNA sense strand against b2GPI
uggcuuuuuggaaaacugaug

SEQ ID NO: 4619 - RNA, 21 nt, Artificial Sequence
  siRNA sense strand against b2GPI
gcuuuuuggaaaacugaugca

SEQ ID NO: 4620 - RNA, 21 nt, Artificial Sequence
  siRNA sense strand against b2GPI
cuuuuuggaaaacugaugcau

SEQ ID NO: 4621 - RNA, 21 nt, Artificial Sequence
  siRNA sense strand against b2GPI
uuggaaaacugaugcauccga

SEQ ID NO: 4622 - RNA, 21 nt, Artificial Sequence
  siRNA sense strand against b2GPI
uggaaaacugaugcauccgau

SEQ ID NO: 4623 - RNA, 21 nt, Artificial Sequence
  siRNA sense strand against b2GPI
ggaaaacugaugcauccgaug

SEQ ID NO: 4624 - RNA, 21 nt, Artificial Sequence
  siRNA sense strand against b2GPI
gaaaacugaugcauccgaugu

SEQ ID NO: 4625 - RNA, 21 nt, Artificial Sequence
  siRNA sense strand against b2GPI
aaaacugaugcauccgaugua

SEQ ID NO: 4626 - RNA, 21 nt, Artificial Sequence
  siRNA sense strand against b2GPI
aacugaugcauccgauguaaa

SEQ ID NO: 4627 - RNA, 21 nt, Artificial Sequence
  siRNA sense strand against b2GPI
acugaugcauccgauguaaag

SEQ ID NO: 4628 - RNA, 21 nt, Artificial Sequence
  siRNA sense strand against b2GPI
augcauccgauguaaagccau

SEQ ID NO: 4629 - RNA, 21 nt, Artificial Sequence
  siRNA sense strand against b2GPI
ugcauccgauguaaagccaug

SEQ ID NO: 4630 - RNA, 21 nt, Artificial Sequence
  siRNA sense strand against b2GPI
auccgauguaaagccaugcua

SEQ ID NO: 4631 - RNA, 21 nt, Artificial Sequence
  siRNA sense strand against b2GPI
uccgauguaaagccaugcuaa

SEQ ID NO: 4632 - RNA, 21 nt, Artificial Sequence
  siRNA sense strand against b2GPI
ccgauguaaagccaugcuaag

SEQ ID NO: 4633 - RNA, 21 nt, Artificial Sequence
  siRNA sense strand against b2GPI
guaaagccaugcuaagguggu

SEQ ID NO: 4634 - RNA, 21 nt, Artificial Sequence
  siRNA sense strand against b2GPI
uaaagccaugcuaaggugguu

SEQ ID NO: 4635 - RNA, 21 nt, Artificial Sequence
  siRNA sense strand against b2GPI
aaagccaugcuaaggugguuu

SEQ ID NO: 4636 - RNA, 21 nt, Artificial Sequence
  siRNA sense strand against b2GPI
aagccaugcuaaggugguuuu

SEQ ID NO: 4637 - RNA, 21 nt, Artificial Sequence
  siRNA sense strand against b2GPI
agccaugcuaaggugguuuuc

SEQ ID NO: 4638 - RNA, 21 nt, Artificial Sequence
  siRNA sense strand against b2GPI
gccaugcuaaggugguuuuca

SEQ ID NO: 4639 - RNA, 21 nt, Artificial Sequence
  siRNA sense strand against b2GPI
ccaugcuaaggugguuuucag

SEQ ID NO: 4640 - RNA, 21 nt, Artificial Sequence
  siRNA sense strand against b2GPI
caugcuaaggugguuuucaga

SEQ ID NO: 4641 - RNA, 21 nt, Artificial Sequence
  siRNA sense strand against b2GPI
ugcuaaggugguuuucagauu

SEQ ID NO: 4642 - RNA, 21 nt, Artificial Sequence
  siRNA sense strand against b2GPI
gcuaaggugguuuucagauuc

SEQ ID NO: 4643 - RNA, 21 nt, Artificial Sequence
  siRNA sense strand against b2GPI
uaaggugguuuucagauucca

SEQ ID NO: 4644 - RNA, 21 nt, Artificial Sequence
  siRNA sense strand against b2GPI
aaggugguuuucagauuccac

SEQ ID NO: 4645 - RNA, 21 nt, Artificial Sequence
  siRNA sense strand against b2GPI
aggugguuuucagauuccaca

SEQ ID NO: 4646 - RNA, 21 nt, Artificial Sequence
  siRNA sense strand against b2GPI
gugguuuucagauuccacaca

SEQ ID NO: 4647 - RNA, 21 nt, Artificial Sequence
  siRNA sense strand against b2GPI
ugguuuucagauuccacacaa

SEQ ID NO: 4648 - RNA, 21 nt, Artificial Sequence
  siRNA sense strand against b2GPI
gguuuucagauuccacacaaa

SEQ ID NO: 4649 - RNA, 21 nt, Artificial Sequence
  siRNA sense strand against b2GPI
guuuucagauuccacacaaaa

SEQ ID NO: 4650 - RNA, 21 nt, Artificial Sequence
  siRNA sense strand against b2GPI
uuuucagauuccacacaaaau

SEQ ID NO: 4651 - RNA, 21 nt, Artificial Sequence
  siRNA sense strand against b2GPI
uuucagauuccacacaaaaug

SEQ ID NO: 4652 - RNA, 21 nt, Artificial Sequence
  siRNA sense strand against b2GPI
uucagauuccacacaaaaugu

SEQ ID NO: 4653 - RNA, 21 nt, Artificial Sequence
  siRNA sense strand against b2GPI
ucagauuccacacaaaauguc

SEQ ID NO: 4654 - RNA, 21 nt, Artificial Sequence
  siRNA sense strand against b2GPI
cagauuccacacaaaauguca

SEQ ID NO: 4655 - RNA, 21 nt, Artificial Sequence
  siRNA sense strand against b2GPI
gauuccacacaaaaugucaca

SEQ ID NO: 4656 - RNA, 21 nt, Artificial Sequence
  siRNA sense strand against b2GPI
uuccacacaaaaugucacacu

SEQ ID NO: 4657 - RNA, 21 nt, Artificial Sequence
  siRNA sense strand against b2GPI
uccacacaaaaugucacacuu

SEQ ID NO: 4658 - RNA, 21 nt, Artificial Sequence
  siRNA sense strand against b2GPI
ccacacaaaaugucacacuug

SEQ ID NO: 4659 - RNA, 21 nt, Artificial Sequence
  siRNA sense strand against b2GPI
cacacaaaaugucacacuugu

SEQ ID NO: 4660 - RNA, 21 nt, Artificial Sequence
  siRNA sense strand against b2GPI
acacaaaaugucacacuuguu

SEQ ID NO: 4661 - RNA, 21 nt, Artificial Sequence
  siRNA sense strand against b2GPI
cacaaaaugucacacuuguuu

SEQ ID NO: 4662 - RNA, 21 nt, Artificial Sequence
  siRNA sense strand against b2GPI
caaaaugucacacuuguuucu

SEQ ID NO: 4663 - RNA, 21 nt, Artificial Sequence
  siRNA sense strand against b2GPI
aaaugucacacuuguuucuug

SEQ ID NO: 4664 - RNA, 21 nt, Artificial Sequence
  siRNA sense strand against b2GPI
aaugucacacuuguuucuugu

SEQ ID NO: 4665 - RNA, 21 nt, Artificial Sequence
  siRNA sense strand against b2GPI
augucacacuuguuucuuguu

SEQ ID NO: 4666 - RNA, 21 nt, Artificial Sequence
  siRNA sense strand against b2GPI
gucacacuuguuucuuguuca

SEQ ID NO: 4667 - RNA, 21 nt, Artificial Sequence
  siRNA sense strand against b2GPI
ucacacuuguuucuuguucau

SEQ ID NO: 4668 - RNA, 21 nt, Artificial Sequence
  siRNA sense strand against b2GPI
acacuuguuucuuguucaucc

SEQ ID NO: 4669 - RNA, 21 nt, Artificial Sequence
  siRNA sense strand against b2GPI
cacuuguuucuuguucaucca

SEQ ID NO: 4670 - RNA, 21 nt, Artificial Sequence
  siRNA sense strand against b2GPI
acuuguuucuuguucauccaa

SEQ ID NO: 4671 - RNA, 21 nt, Artificial Sequence
  siRNA sense strand against b2GPI
cuuguuucuuguucauccaag

SEQ ID NO: 4672 - RNA, 21 nt, Artificial Sequence
  siRNA sense strand against b2GPI
uuguuucuuguucauccaagg

SEQ ID NO: 4673 - RNA, 21 nt, Artificial Sequence
  siRNA sense strand against b2GPI
guuucuuguucauccaaggaa

SEQ ID NO: 4674 - RNA, 21 nt, Artificial Sequence
  siRNA sense strand against b2GPI
uuucuuguucauccaaggaac

SEQ ID NO: 4675 - RNA, 21 nt, Artificial Sequence
  siRNA sense strand against b2GPI
uucuuguucauccaaggaacc

SEQ ID NO: 4676 - RNA, 21 nt, Artificial Sequence
  siRNA sense strand against b2GPI
ucuuguucauccaaggaaccu

SEQ ID NO: 4677 - RNA, 21 nt, Artificial Sequence
  siRNA sense strand against b2GPI
cuuguucauccaaggaaccua

SEQ ID NO: 4678 - RNA, 21 nt, Artificial Sequence
  siRNA sense strand against b2GPI
uuguucauccaaggaaccuaa

SEQ ID NO: 4679 - RNA, 21 nt, Artificial Sequence
  siRNA sense strand against b2GPI
uguucauccaaggaaccuaau

SEQ ID NO: 4680 - RNA, 21 nt, Artificial Sequence
  siRNA sense strand against b2GPI
guucauccaaggaaccuaauu

SEQ ID NO: 4681 - RNA, 21 nt, Artificial Sequence
  siRNA sense strand against b2GPI
uucauccaaggaaccuaauug

SEQ ID NO: 4682 - RNA, 21 nt, Artificial Sequence
  siRNA sense strand against b2GPI
ucauccaaggaaccuaauuga

SEQ ID NO: 4683 - RNA, 21 nt, Artificial Sequence
  siRNA sense strand against b2GPI
cauccaaggaaccuaauugaa

SEQ ID NO: 4684 - RNA, 21 nt, Artificial Sequence
  siRNA sense strand against b2GPI
auccaaggaaccuaauugaaa

SEQ ID NO: 4685 - RNA, 21 nt, Artificial Sequence
  siRNA sense strand against b2GPI
uccaaggaaccuaauugaaau

SEQ ID NO: 4686 - RNA, 21 nt, Artificial Sequence
  siRNA sense strand against b2GPI
ccaaggaaccuaauugaaauu

SEQ ID NO: 4687 - RNA, 21 nt, Artificial Sequence
  siRNA sense strand against b2GPI
caaggaaccuaauugaaauuu

SEQ ID NO: 4688 - RNA, 21 nt, Artificial Sequence
  siRNA sense strand against b2GPI
aaggaaccuaauugaaauuua

SEQ ID NO: 4689 - RNA, 21 nt, Artificial Sequence
  siRNA sense strand against b2GPI
aggaaccuaauugaaauuuaa

SEQ ID NO: 4690 - RNA, 21 nt, Artificial Sequence
  siRNA sense strand against b2GPI
ggaaccuaauugaaauuuaaa

SEQ ID NO: 4691 - RNA, 21 nt, Artificial Sequence
  siRNA sense strand against b2GPI
gaaccuaauugaaauuuaaaa

SEQ ID NO: 4692 - RNA, 21 nt, Artificial Sequence
  siRNA sense strand against b2GPI
cuaauugaaauuuaaaaauaa

SEQ ID NO: 4693 - RNA, 21 nt, Artificial Sequence
  siRNA sense strand against b2GPI
uaaaaauaaagcuacugaauu

SEQ ID NO: 4694 - RNA, 21 nt, Artificial Sequence
  siRNA sense strand against b2GPI
aaaaauaaagcuacugaauuu

SEQ ID NO: 4695 - RNA, 21 nt, Artificial Sequence
  siRNA sense strand against b2GPI
aaaauaaagcuacugaauuua

SEQ ID NO: 4696 - RNA, 21 nt, Artificial Sequence
  siRNA sense strand against b2GPI
aauaaagcuacugaauuuauu

SEQ ID NO: 4697 - RNA, 21 nt, Artificial Sequence
  siRNA sense strand against b2GPI
aagcuacugaauuuauugccg

SEQ ID NO: 4698 - RNA, 21 nt, Artificial Sequence
  siRNA sense strand against b2GPI
agcuacugaauuuauugccgc

SEQ ID NO: 4699 - RNA, 21 nt, Artificial Sequence
  siRNA sense strand against b2GPI
gcuacugaauuuauugccgca

SEQ ID NO: 4700 - RNA, 21 nt, Artificial Sequence
  siRNA sense strand against b2GPI
cuacugaauuuauugccgcac

SEQ ID NO: 4701 - RNA, 21 nt, Artificial Sequence
  siRNA sense strand against b2GPI
cucugccauguugcuauugca

SEQ ID NO: 4702 - RNA, 21 nt, Artificial Sequence
  siRNA sense strand against b2GPI
gcuggaaucuuagaaaaugga

SEQ ID NO: 4703 - RNA, 23 nt, Artificial Sequence
  siRNA antisense strand against b2GPI
ugagucacacuggcacuaccaaa

SEQ ID NO: 4704 - RNA, 23 nt, Artificial Sequence
  siRNA antisense strand against b2GPI
augagucacacuggcacuaccaa

SEQ ID NO: 4705 - RNA, 23 nt, Artificial Sequence
  siRNA antisense strand against b2GPI
gaugagucacacuggcacuacca

SEQ ID NO: 4706 - RNA, 23 nt, Artificial Sequence
  siRNA antisense strand against b2GPI
ggaugagucacacuggcacuacc

SEQ ID NO: 4707 - RNA, 23 nt, Artificial Sequence
  siRNA antisense strand against b2GPI
uggaugagucacacuggcacuac

SEQ ID NO: 4708 - RNA, 23 nt, Artificial Sequence
  siRNA antisense strand against b2GPI
guggaugagucacacuggcacua

SEQ ID NO: 4709 - RNA, 23 nt, Artificial Sequence
  siRNA antisense strand against b2GPI
uguggaugagucacacuggcacu

SEQ ID NO: 4710 - RNA, 23 nt, Artificial Sequence
  siRNA antisense strand against b2GPI
uuguggaugagucacacuggcac

SEQ ID NO: 4711 - RNA, 23 nt, Artificial Sequence
  siRNA antisense strand against b2GPI
auuguggaugagucacacuggca

SEQ ID NO: 4712 - RNA, 23 nt, Artificial Sequence
  siRNA antisense strand against b2GPI
cauuguggaugagucacacuggc

SEQ ID NO: 4713 - RNA, 23 nt, Artificial Sequence
  siRNA antisense strand against b2GPI
ucauuguggaugagucacacugg

SEQ ID NO: 4714 - RNA, 23 nt, Artificial Sequence
  siRNA antisense strand against b2GPI
aucauuguggaugagucacacug

SEQ ID NO: 4715 - RNA, 23 nt, Artificial Sequence
  siRNA antisense strand against b2GPI
aaucauuguggaugagucacacu

SEQ ID NO: 4716 - RNA, 23 nt, Artificial Sequence
  siRNA antisense strand against b2GPI
aaaucauuguggaugagucacac

SEQ ID NO: 4717 - RNA, 23 nt, Artificial Sequence
  siRNA antisense strand against b2GPI
gaaaucauuguggaugagucaca

SEQ ID NO: 4718 - RNA, 23 nt, Artificial Sequence
  siRNA antisense strand against b2GPI
agaaaucauuguggaugagucac

SEQ ID NO: 4719 - RNA, 23 nt, Artificial Sequence
  siRNA antisense strand against b2GPI
ggagaaaucauuguggaugaguc

SEQ ID NO: 4720 - RNA, 23 nt, Artificial Sequence
  siRNA antisense strand against b2GPI
uggagaaaucauuguggaugagu

SEQ ID NO: 4721 - RNA, 23 nt, Artificial Sequence
  siRNA antisense strand against b2GPI
cuggagaaaucauuguggaugag

SEQ ID NO: 4722 - RNA, 23 nt, Artificial Sequence
  siRNA antisense strand against b2GPI
acuggagaaaucauuguggauga

SEQ ID NO: 4723 - RNA, 23 nt, Artificial Sequence
  siRNA antisense strand against b2GPI
cacuggagaaaucauuguggaug

SEQ ID NO: 4724 - RNA, 23 nt, Artificial Sequence
  siRNA antisense strand against b2GPI
gcacuggagaaaucauuguggau

SEQ ID NO: 4725 - RNA, 23 nt, Artificial Sequence
  siRNA antisense strand against b2GPI
agcacuggagaaaucauugugga

SEQ ID NO: 4726 - RNA, 23 nt, Artificial Sequence
  siRNA antisense strand against b2GPI
gagcacuggagaaaucauugugg

SEQ ID NO: 4727 - RNA, 23 nt, Artificial Sequence
  siRNA antisense strand against b2GPI
ugagcacuggagaaaucauugug

SEQ ID NO: 4728 - RNA, 23 nt, Artificial Sequence
  siRNA antisense strand against b2GPI
augagcacuggagaaaucauugu

SEQ ID NO: 4729 - RNA, 23 nt, Artificial Sequence
  siRNA antisense strand against b2GPI
gaugagcacuggagaaaucauug

SEQ ID NO: 4730 - RNA, 23 nt, Artificial Sequence
  siRNA antisense strand against b2GPI
agaugagcacuggagaaaucauu

SEQ ID NO: 4731 - RNA, 23 nt, Artificial Sequence
  siRNA antisense strand against b2GPI
aagaugagcacuggagaaaucau

SEQ ID NO: 4732 - RNA, 23 nt, Artificial Sequence
  siRNA antisense strand against b2GPI
caagaugagcacuggagaaauca

SEQ ID NO: 4733 - RNA, 23 nt, Artificial Sequence
  siRNA antisense strand against b2GPI
acaagaugagcacuggagaaauc

SEQ ID NO: 4734 - RNA, 23 nt, Artificial Sequence
  siRNA antisense strand against b2GPI
aacaagaugagcacuggagaaau

SEQ ID NO: 4735 - RNA, 23 nt, Artificial Sequence
  siRNA antisense strand against b2GPI
gaacaagaugagcacuggagaaa

SEQ ID NO: 4736 - RNA, 23 nt, Artificial Sequence
  siRNA antisense strand against b2GPI
agaacaagaugagcacuggagaa

SEQ ID NO: 4737 - RNA, 23 nt, Artificial Sequence
  siRNA antisense strand against b2GPI
gagaacaagaugagcacuggaga

SEQ ID NO: 4738 - RNA, 23 nt, Artificial Sequence
  siRNA antisense strand against b2GPI
cgagaacaagaugagcacuggag

SEQ ID NO: 4739 - RNA, 23 nt, Artificial Sequence
  siRNA antisense strand against b2GPI
ucgagaacaagaugagcacugga

SEQ ID NO: 4740 - RNA, 23 nt, Artificial Sequence
  siRNA antisense strand against b2GPI
cucgagaacaagaugagcacugg

SEQ ID NO: 4741 - RNA, 23 nt, Artificial Sequence
  siRNA antisense strand against b2GPI
acucgagaacaagaugagcacug

SEQ ID NO: 4742 - RNA, 23 nt, Artificial Sequence
  siRNA antisense strand against b2GPI
aacucgagaacaagaugagcacu

SEQ ID NO: 4743 - RNA, 23 nt, Artificial Sequence
  siRNA antisense strand against b2GPI
aaacucgagaacaagaugagcac

SEQ ID NO: 4744 - RNA, 23 nt, Artificial Sequence
  siRNA antisense strand against b2GPI
aaaacucgagaacaagaugagca

SEQ ID NO: 4745 - RNA, 23 nt, Artificial Sequence
  siRNA antisense strand against b2GPI
gaaaacucgagaacaagaugagc

SEQ ID NO: 4746 - RNA, 23 nt, Artificial Sequence
  siRNA antisense strand against b2GPI
agaaaacucgagaacaagaugag

SEQ ID NO: 4747 - RNA, 23 nt, Artificial Sequence
  siRNA antisense strand against b2GPI
gagaaaacucgagaacaagauga

SEQ ID NO: 4748 - RNA, 23 nt, Artificial Sequence
  siRNA antisense strand against b2GPI
agagaaaacucgagaacaagaug

SEQ ID NO: 4749 - RNA, 23 nt, Artificial Sequence
  siRNA antisense strand against b2GPI
cagagaaaacucgagaacaagau

SEQ ID NO: 4750 - RNA, 23 nt, Artificial Sequence
  siRNA antisense strand against b2GPI
gcagagaaaacucgagaacaaga

SEQ ID NO: 4751 - RNA, 23 nt, Artificial Sequence
  siRNA antisense strand against b2GPI
uggcagagaaaacucgagaacaa

SEQ ID NO: 4752 - RNA, 23 nt, Artificial Sequence
  siRNA antisense strand against b2GPI
auggcagagaaaacucgagaaca

SEQ ID NO: 4753 - RNA, 23 nt, Artificial Sequence
  siRNA antisense strand against b2GPI
cauggcagagaaaacucgagaac

SEQ ID NO: 4754 - RNA, 23 nt, Artificial Sequence
  siRNA antisense strand against b2GPI
acauggcagagaaaacucgagaa

SEQ ID NO: 4755 - RNA, 23 nt, Artificial Sequence
  siRNA antisense strand against b2GPI
aacauggcagagaaaacucgaga

SEQ ID NO: 4756 - RNA, 23 nt, Artificial Sequence
  siRNA antisense strand against b2GPI
caacauggcagagaaaacucgag

SEQ ID NO: 4757 - RNA, 23 nt, Artificial Sequence
  siRNA antisense strand against b2GPI
gcaacauggcagagaaaacucga

SEQ ID NO: 4758 - RNA, 23 nt, Artificial Sequence
  siRNA antisense strand against b2GPI
agcaacauggcagagaaaacucg

SEQ ID NO: 4759 - RNA, 23 nt, Artificial Sequence
  siRNA antisense strand against b2GPI
uagcaacauggcagagaaaacuc

SEQ ID NO: 4760 - RNA, 23 nt, Artificial Sequence
  siRNA antisense strand against b2GPI
auagcaacauggcagagaaaacu

SEQ ID NO: 4761 - RNA, 23 nt, Artificial Sequence
  siRNA antisense strand against b2GPI
aauagcaacauggcagagaaaac

SEQ ID NO: 4762 - RNA, 23 nt, Artificial Sequence
  siRNA antisense strand against b2GPI
ugcaauagcaacauggcagagaa

SEQ ID NO: 4763 - RNA, 23 nt, Artificial Sequence
  siRNA antisense strand against b2GPI
cugcaauagcaacauggcagaga

SEQ ID NO: 4764 - RNA, 23 nt, Artificial Sequence
  siRNA antisense strand against b2GPI
ccugcaauagcaacauggcagag

SEQ ID NO: 4765 - RNA, 23 nt, Artificial Sequence
  siRNA antisense strand against b2GPI
uccugcaauagcaacauggcaga

SEQ ID NO: 4766 - RNA, 23 nt, Artificial Sequence
  siRNA antisense strand against b2GPI
uccguccugcaauagcaacaugg

SEQ ID NO: 4767 - RNA, 23 nt, Artificial Sequence
  siRNA antisense strand against b2GPI
agguccguccugcaauagcaaca

SEQ ID NO: 4768 - RNA, 23 nt, Artificial Sequence
  siRNA antisense strand against b2GPI
cagguccguccugcaauagcaac

SEQ ID NO: 4769 - RNA, 23 nt, Artificial Sequence
  siRNA antisense strand against b2GPI
acagguccguccugcaauagcaa

SEQ ID NO: 4770 - RNA, 23 nt, Artificial Sequence
  siRNA antisense strand against b2GPI
gacagguccguccugcaauagca

SEQ ID NO: 4771 - RNA, 23 nt, Artificial Sequence
  siRNA antisense strand against b2GPI
ugggacagguccguccugcaaua

SEQ ID NO: 4772 - RNA, 23 nt, Artificial Sequence
  siRNA antisense strand against b2GPI
cuugggacagguccguccugcaa

SEQ ID NO: 4773 - RNA, 23 nt, Artificial Sequence
  siRNA antisense strand against b2GPI
gcuugggacagguccguccugca

SEQ ID NO: 4774 - RNA, 23 nt, Artificial Sequence
  siRNA antisense strand against b2GPI
uggcuugggacagguccguccug

SEQ ID NO: 4775 - RNA, 23 nt, Artificial Sequence
  siRNA antisense strand against b2GPI
cuggcuugggacagguccguccu

SEQ ID NO: 4776 - RNA, 23 nt, Artificial Sequence
  siRNA antisense strand against b2GPI
ucuggcuugggacagguccgucc

SEQ ID NO: 4777 - RNA, 23 nt, Artificial Sequence
  siRNA antisense strand against b2GPI
aucuggcuugggacagguccguc

SEQ ID NO: 4778 - RNA, 23 nt, Artificial Sequence
  siRNA antisense strand against b2GPI
caucuggcuugggacagguccgu

SEQ ID NO: 4779 - RNA, 23 nt, Artificial Sequence
  siRNA antisense strand against b2GPI
ucaucuggcuugggacagguccg

SEQ ID NO: 4780 - RNA, 23 nt, Artificial Sequence
  siRNA antisense strand against b2GPI
aucaucuggcuugggacaggucc

SEQ ID NO: 4781 - RNA, 23 nt, Artificial Sequence
  siRNA antisense strand against b2GPI
aaucaucuggcuugggacagguc

SEQ ID NO: 4782 - RNA, 23 nt, Artificial Sequence
  siRNA antisense strand against b2GPI
aaaucaucuggcuugggacaggu

SEQ ID NO: 4783 - RNA, 23 nt, Artificial Sequence
  siRNA antisense strand against b2GPI
uaaaucaucuggcuugggacagg

SEQ ID NO: 4784 - RNA, 23 nt, Artificial Sequence
  siRNA antisense strand against b2GPI
guaaaucaucuggcuugggacag

SEQ ID NO: 4785 - RNA, 23 nt, Artificial Sequence
  siRNA antisense strand against b2GPI
gguaaaucaucuggcuugggaca

SEQ ID NO: 4786 - RNA, 23 nt, Artificial Sequence
  siRNA antisense strand against b2GPI
ugguaaaucaucuggcuugggac

SEQ ID NO: 4787 - RNA, 23 nt, Artificial Sequence
  siRNA antisense strand against b2GPI
augguaaaucaucuggcuuggga

SEQ ID NO: 4788 - RNA, 23 nt, Artificial Sequence
  siRNA antisense strand against b2GPI
aaugguaaaucaucuggcuuggg

SEQ ID NO: 4789 - RNA, 23 nt, Artificial Sequence
  siRNA antisense strand against b2GPI
aaaugguaaaucaucuggcuugg

SEQ ID NO: 4790 - RNA, 23 nt, Artificial Sequence
  siRNA antisense strand against b2GPI
aaaaugguaaaucaucuggcuug

SEQ ID NO: 4791 - RNA, 23 nt, Artificial Sequence
  siRNA antisense strand against b2GPI
gaaaaugguaaaucaucuggcuu

SEQ ID NO: 4792 - RNA, 23 nt, Artificial Sequence
  siRNA antisense strand against b2GPI
ggaaaaugguaaaucaucuggcu

SEQ ID NO: 4793 - RNA, 23 nt, Artificial Sequence
  siRNA antisense strand against b2GPI
uggaaaaugguaaaucaucuggc

SEQ ID NO: 4794 - RNA, 23 nt, Artificial Sequence
  siRNA antisense strand against b2GPI
guggaaaaugguaaaucaucugg

SEQ ID NO: 4795 - RNA, 23 nt, Artificial Sequence
  siRNA antisense strand against b2GPI
uguggaaaaugguaaaucaucug

SEQ ID NO: 4796 - RNA, 23 nt, Artificial Sequence
  siRNA antisense strand against b2GPI
cuguggaaaaugguaaaucaucu

SEQ ID NO: 4797 - RNA, 23 nt, Artificial Sequence
  siRNA antisense strand against b2GPI
accacuguggaaaaugguaaauc

SEQ ID NO: 4798 - RNA, 23 nt, Artificial Sequence
  siRNA antisense strand against b2GPI
gaccacuguggaaaaugguaaau

SEQ ID NO: 4799 - RNA, 23 nt, Artificial Sequence
  siRNA antisense strand against b2GPI
ggaccacuguggaaaaugguaaa

SEQ ID NO: 4800 - RNA, 23 nt, Artificial Sequence
  siRNA antisense strand against b2GPI
aacgggaccacuguggaaaaugg

SEQ ID NO: 4801 - RNA, 23 nt, Artificial Sequence
  siRNA antisense strand against b2GPI
uaacgggaccacuguggaaaaug

SEQ ID NO: 4802 - RNA, 23 nt, Artificial Sequence
  siRNA antisense strand against b2GPI
uuaacgggaccacuguggaaaau

SEQ ID NO: 4803 - RNA, 23 nt, Artificial Sequence
  siRNA antisense strand against b2GPI
uuuaacgggaccacuguggaaaa

SEQ ID NO: 4804 - RNA, 23 nt, Artificial Sequence
  siRNA antisense strand against b2GPI
uuuuaacgggaccacuguggaaa

SEQ ID NO: 4805 - RNA, 23 nt, Artificial Sequence
  siRNA antisense strand against b2GPI
uuuuuaacgggaccacuguggaa

SEQ ID NO: 4806 - RNA, 23 nt, Artificial Sequence
  siRNA antisense strand against b2GPI
guuuuuaacgggaccacugugga

SEQ ID NO: 4807 - RNA, 23 nt, Artificial Sequence
  siRNA antisense strand against b2GPI
uguuuuuaacgggaccacugugg

SEQ ID NO: 4808 - RNA, 23 nt, Artificial Sequence
  siRNA antisense strand against b2GPI
auguuuuuaacgggaccacugug

SEQ ID NO: 4809 - RNA, 23 nt, Artificial Sequence
  siRNA antisense strand against b2GPI
aauguuuuuaacgggaccacugu

SEQ ID NO: 4810 - RNA, 23 nt, Artificial Sequence
  siRNA antisense strand against b2GPI
gaauguuuuuaacgggaccacug

SEQ ID NO: 4811 - RNA, 23 nt, Artificial Sequence
  siRNA antisense strand against b2GPI
agaauguuuuuaacgggaccacu

SEQ ID NO: 4812 - RNA, 23 nt, Artificial Sequence
  siRNA antisense strand against b2GPI
uagaauguuuuuaacgggaccac

SEQ ID NO: 4813 - RNA, 23 nt, Artificial Sequence
  siRNA antisense strand against b2GPI
auagaauguuuuuaacgggacca

SEQ ID NO: 4814 - RNA, 23 nt, Artificial Sequence
  siRNA antisense strand against b2GPI
cauagaauguuuuuaacgggacc

SEQ ID NO: 4815 - RNA, 23 nt, Artificial Sequence
  siRNA antisense strand against b2GPI
ucauagaauguuuuuaacgggac

SEQ ID NO: 4816 - RNA, 23 nt, Artificial Sequence
  siRNA antisense strand against b2GPI
ucuccuggcucauagaauguuuu

SEQ ID NO: 4817 - RNA, 23 nt, Artificial Sequence
  siRNA antisense strand against b2GPI
uucuccuggcucauagaauguuu

SEQ ID NO: 4818 - RNA, 23 nt, Artificial Sequence
  siRNA antisense strand against b2GPI
cucuucuccuggcucauagaaug

SEQ ID NO: 4819 - RNA, 23 nt, Artificial Sequence
  siRNA antisense strand against b2GPI
ucucuucuccuggcucauagaau

SEQ ID NO: 4820 - RNA, 23 nt, Artificial Sequence
  siRNA antisense strand against b2GPI
aucucuucuccuggcucauagaa

SEQ ID NO: 4821 - RNA, 23 nt, Artificial Sequence
  siRNA antisense strand against b2GPI
aaucucuucuccuggcucauaga

SEQ ID NO: 4822 - RNA, 23 nt, Artificial Sequence
  siRNA antisense strand against b2GPI
uaaucucuucuccuggcucauag

SEQ ID NO: 4823 - RNA, 23 nt, Artificial Sequence
  siRNA antisense strand against b2GPI
cguaaucucuucuccuggcucau

SEQ ID NO: 4824 - RNA, 23 nt, Artificial Sequence
  siRNA antisense strand against b2GPI
acguaaucucuucuccuggcuca

SEQ ID NO: 4825 - RNA, 23 nt, Artificial Sequence
  siRNA antisense strand against b2GPI
uacguaaucucuucuccuggcuc

SEQ ID NO: 4826 - RNA, 23 nt, Artificial Sequence
  siRNA antisense strand against b2GPI
auacguaaucucuucuccuggcu

SEQ ID NO: 4827 - RNA, 23 nt, Artificial Sequence
  siRNA antisense strand against b2GPI
aauacguaaucucuucuccuggc

SEQ ID NO: 4828 - RNA, 23 nt, Artificial Sequence
  siRNA antisense strand against b2GPI
gaauacguaaucucuucuccugg

SEQ ID NO: 4829 - RNA, 23 nt, Artificial Sequence
  siRNA antisense strand against b2GPI
ggaauacguaaucucuucuccug

SEQ ID NO: 4830 - RNA, 23 nt, Artificial Sequence
  siRNA antisense strand against b2GPI
aggaauacguaaucucuucuccu

SEQ ID NO: 4831 - RNA, 23 nt, Artificial Sequence
  siRNA antisense strand against b2GPI
ugcaggaauacguaaucucuucu

SEQ ID NO: 4832 - RNA, 23 nt, Artificial Sequence
  siRNA antisense strand against b2GPI
uugcaggaauacguaaucucuuc

SEQ ID NO: 4833 - RNA, 23 nt, Artificial Sequence
  siRNA antisense strand against b2GPI
cuugcaggaauacguaaucucuu

SEQ ID NO: 4834 - RNA, 23 nt, Artificial Sequence
  siRNA antisense strand against b2GPI
ccggcuugcaggaauacguaauc

SEQ ID NO: 4835 - RNA, 23 nt, Artificial Sequence
  siRNA antisense strand against b2GPI
uagcccggcuugcaggaauacgu

SEQ ID NO: 4836 - RNA, 23 nt, Artificial Sequence
  siRNA antisense strand against b2GPI
cacauagcccggcuugcaggaau

SEQ ID NO: 4837 - RNA, 23 nt, Artificial Sequence
  siRNA antisense strand against b2GPI
ucucaucccuccucgggacacau

SEQ ID NO: 4838 - RNA, 23 nt, Artificial Sequence
  siRNA antisense strand against b2GPI
uucucaucccuccucgggacaca

SEQ ID NO: 4839 - RNA, 23 nt, Artificial Sequence
  siRNA antisense strand against b2GPI
acuuucucaucccuccucgggac

SEQ ID NO: 4840 - RNA, 23 nt, Artificial Sequence
  siRNA antisense strand against b2GPI
aacuuucucaucccuccucggga

SEQ ID NO: 4841 - RNA, 23 nt, Artificial Sequence
  siRNA antisense strand against b2GPI
aaacuuucucaucccuccucggg

SEQ ID NO: 4842 - RNA, 23 nt, Artificial Sequence
  siRNA antisense strand against b2GPI
uaaacuuucucaucccuccucgg

SEQ ID NO: 4843 - RNA, 23 nt, Artificial Sequence
  siRNA antisense strand against b2GPI
auaaacuuucucaucccuccucg

SEQ ID NO: 4844 - RNA, 23 nt, Artificial Sequence
  siRNA antisense strand against b2GPI
gauaaacuuucucaucccuccuc

SEQ ID NO: 4845 - RNA, 23 nt, Artificial Sequence
  siRNA antisense strand against b2GPI
agauaaacuuucucaucccuccu

SEQ ID NO: 4846 - RNA, 23 nt, Artificial Sequence
  siRNA antisense strand against b2GPI
cagauaaacuuucucaucccucc

SEQ ID NO: 4847 - RNA, 23 nt, Artificial Sequence
  siRNA antisense strand against b2GPI
agagggcagauaaacuuucucau

SEQ ID NO: 4848 - RNA, 23 nt, Artificial Sequence
  siRNA antisense strand against b2GPI
ugagagggcagauaaacuuucuc

SEQ ID NO: 4849 - RNA, 23 nt, Artificial Sequence
  siRNA antisense strand against b2GPI
ccacaguccugugagagggcaga

SEQ ID NO: 4850 - RNA, 23 nt, Artificial Sequence
  siRNA antisense strand against b2GPI
augggccacaguccugugagagg

SEQ ID NO: 4851 - RNA, 23 nt, Artificial Sequence
  siRNA antisense strand against b2GPI
ugaugggccacaguccugugaga

SEQ ID NO: 4852 - RNA, 23 nt, Artificial Sequence
  siRNA antisense strand against b2GPI
uguugaugggccacaguccugug

SEQ ID NO: 4853 - RNA, 23 nt, Artificial Sequence
  siRNA antisense strand against b2GPI
guguugaugggccacaguccugu

SEQ ID NO: 4854 - RNA, 23 nt, Artificial Sequence
  siRNA antisense strand against b2GPI
uucagaguguugaugggccacag

SEQ ID NO: 4855 - RNA, 23 nt, Artificial Sequence
  siRNA antisense strand against b2GPI
auuucagaguguugaugggccac

SEQ ID NO: 4856 - RNA, 23 nt, Artificial Sequence
  siRNA antisense strand against b2GPI
cauuucagaguguugaugggcca

SEQ ID NO: 4857 - RNA, 23 nt, Artificial Sequence
  siRNA antisense strand against b2GPI
acauuucagaguguugaugggcc

SEQ ID NO: 4858 - RNA, 23 nt, Artificial Sequence
  siRNA antisense strand against b2GPI
uacauuucagaguguugaugggc

SEQ ID NO: 4859 - RNA, 23 nt, Artificial Sequence
  siRNA antisense strand against b2GPI
uguacauuucagaguguugaugg

SEQ ID NO: 4860 - RNA, 23 nt, Artificial Sequence
  siRNA antisense strand against b2GPI
uggguguacauuucagaguguug

SEQ ID NO: 4861 - RNA, 23 nt, Artificial Sequence
  siRNA antisense strand against b2GPI
ucuggguguacauuucagagugu

SEQ ID NO: 4862 - RNA, 23 nt, Artificial Sequence
  siRNA antisense strand against b2GPI
uacucuggguguacauuucagag

SEQ ID NO: 4863 - RNA, 23 nt, Artificial Sequence
  siRNA antisense strand against b2GPI
auacucuggguguacauuucaga

SEQ ID NO: 4864 - RNA, 23 nt, Artificial Sequence
  siRNA antisense strand against b2GPI
acauacucuggguguacauuuca

SEQ ID NO: 4865 - RNA, 23 nt, Artificial Sequence
  siRNA antisense strand against b2GPI
aggacauacucuggguguacauu

SEQ ID NO: 4866 - RNA, 23 nt, Artificial Sequence
  siRNA antisense strand against b2GPI
aaggacauacucuggguguacau

SEQ ID NO: 4867 - RNA, 23 nt, Artificial Sequence
  siRNA antisense strand against b2GPI
aaaggacauacucuggguguaca

SEQ ID NO: 4868 - RNA, 23 nt, Artificial Sequence
  siRNA antisense strand against b2GPI
aaaaggacauacucuggguguac

SEQ ID NO: 4869 - RNA, 23 nt, Artificial Sequence
  siRNA antisense strand against b2GPI
caaaaggacauacucugggugua

SEQ ID NO: 4870 - RNA, 23 nt, Artificial Sequence
  siRNA antisense strand against b2GPI
agcaaaaggacauacucugggug

SEQ ID NO: 4871 - RNA, 23 nt, Artificial Sequence
  siRNA antisense strand against b2GPI
cagcaaaaggacauacucugggu

SEQ ID NO: 4872 - RNA, 23 nt, Artificial Sequence
  siRNA antisense strand against b2GPI
ccagcaaaaggacauacucuggg

SEQ ID NO: 4873 - RNA, 23 nt, Artificial Sequence
  siRNA antisense strand against b2GPI
uccagcaaaaggacauacucugg

SEQ ID NO: 4874 - RNA, 23 nt, Artificial Sequence
  siRNA antisense strand against b2GPI
uuccagcaaaaggacauacucug

SEQ ID NO: 4875 - RNA, 23 nt, Artificial Sequence
  siRNA antisense strand against b2GPI
gauuccagcaaaaggacauacuc

SEQ ID NO: 4876 - RNA, 23 nt, Artificial Sequence
  siRNA antisense strand against b2GPI
agauuccagcaaaaggacauacu

SEQ ID NO: 4877 - RNA, 23 nt, Artificial Sequence
  siRNA antisense strand against b2GPI
aagauuccagcaaaaggacauac

SEQ ID NO: 4878 - RNA, 23 nt, Artificial Sequence
  siRNA antisense strand against b2GPI
uaagauuccagcaaaaggacaua

SEQ ID NO: 4879 - RNA, 23 nt, Artificial Sequence
  siRNA antisense strand against b2GPI
cuaagauuccagcaaaaggacau

SEQ ID NO: 4880 - RNA, 23 nt, Artificial Sequence
  siRNA antisense strand against b2GPI
ucuaagauuccagcaaaaggaca

SEQ ID NO: 4881 - RNA, 23 nt, Artificial Sequence
  siRNA antisense strand against b2GPI
uuuucuaagauuccagcaaaagg

SEQ ID NO: 4882 - RNA, 23 nt, Artificial Sequence
  siRNA antisense strand against b2GPI
auuuucuaagauuccagcaaaag

SEQ ID NO: 4883 - RNA, 23 nt, Artificial Sequence
  siRNA antisense strand against b2GPI
cauuuucuaagauuccagcaaaa

SEQ ID NO: 4884 - RNA, 23 nt, Artificial Sequence
  siRNA antisense strand against b2GPI
ccauuuucuaagauuccagcaaa

SEQ ID NO: 4885 - RNA, 23 nt, Artificial Sequence
  siRNA antisense strand against b2GPI
uccauuuucuaagauuccagcaa

SEQ ID NO: 4886 - RNA, 23 nt, Artificial Sequence
  siRNA antisense strand against b2GPI
cuccauuuucuaagauuccagca

SEQ ID NO: 4887 - RNA, 23 nt, Artificial Sequence
  siRNA antisense strand against b2GPI
uacggcuccauuuucuaagauuc

SEQ ID NO: 4888 - RNA, 23 nt, Artificial Sequence
  siRNA antisense strand against b2GPI
gcguacggcuccauuuucuaaga

SEQ ID NO: 4889 - RNA, 23 nt, Artificial Sequence
  siRNA antisense strand against b2GPI
agcguacggcuccauuuucuaag

SEQ ID NO: 4890 - RNA, 23 nt, Artificial Sequence
  siRNA antisense strand against b2GPI
uagcguacggcuccauuuucuaa

SEQ ID NO: 4891 - RNA, 23 nt, Artificial Sequence
  siRNA antisense strand against b2GPI
auagcguacggcuccauuuucua

SEQ ID NO: 4892 - RNA, 23 nt, Artificial Sequence
  siRNA antisense strand against b2GPI
uauagcguacggcuccauuuucu

SEQ ID NO: 4893 - RNA, 23 nt, Artificial Sequence
  siRNA antisense strand against b2GPI
ucguauagcguacggcuccauuu

SEQ ID NO: 4894 - RNA, 23 nt, Artificial Sequence
  siRNA antisense strand against b2GPI
gucguauagcguacggcuccauu

SEQ ID NO: 4895 - RNA, 23 nt, Artificial Sequence
  siRNA antisense strand against b2GPI
agucguauagcguacggcuccau

SEQ ID NO: 4896 - RNA, 23 nt, Artificial Sequence
  siRNA antisense strand against b2GPI
aagucguauagcguacggcucca

SEQ ID NO: 4897 - RNA, 23 nt, Artificial Sequence
  siRNA antisense strand against b2GPI
aaagucguauagcguacggcucc

SEQ ID NO: 4898 - RNA, 23 nt, Artificial Sequence
  siRNA antisense strand against b2GPI
aaaagucguauagcguacggcuc

SEQ ID NO: 4899 - RNA, 23 nt, Artificial Sequence
  siRNA antisense strand against b2GPI
caaaagucguauagcguacggcu

SEQ ID NO: 4900 - RNA, 23 nt, Artificial Sequence
  siRNA antisense strand against b2GPI
ucaaaagucguauagcguacggc

SEQ ID NO: 4901 - RNA, 23 nt, Artificial Sequence
  siRNA antisense strand against b2GPI
uucaaaagucguauagcguacgg

SEQ ID NO: 4902 - RNA, 23 nt, Artificial Sequence
  siRNA antisense strand against b2GPI
auucaaaagucguauagcguacg

SEQ ID NO: 4903 - RNA, 23 nt, Artificial Sequence
  siRNA antisense strand against b2GPI
auauucaaaagucguauagcgua

SEQ ID NO: 4904 - RNA, 23 nt, Artificial Sequence
  siRNA antisense strand against b2GPI
gauauucaaaagucguauagcgu

SEQ ID NO: 4905 - RNA, 23 nt, Artificial Sequence
  siRNA antisense strand against b2GPI
ugggauauucaaaagucguauag

SEQ ID NO: 4906 - RNA, 23 nt, Artificial Sequence
  siRNA antisense strand against b2GPI
uugggauauucaaaagucguaua

SEQ ID NO: 4907 - RNA, 23 nt, Artificial Sequence
  siRNA antisense strand against b2GPI
guugggauauucaaaagucguau

SEQ ID NO: 4908 - RNA, 23 nt, Artificial Sequence
  siRNA antisense strand against b2GPI
uguugggauauucaaaagucgua

SEQ ID NO: 4909 - RNA, 23 nt, Artificial Sequence
  siRNA antisense strand against b2GPI
ucguguugggauauucaaaaguc

SEQ ID NO: 4910 - RNA, 23 nt, Artificial Sequence
  siRNA antisense strand against b2GPI
aucguguugggauauucaaaagu

SEQ ID NO: 4911 - RNA, 23 nt, Artificial Sequence
  siRNA antisense strand against b2GPI
gaucguguugggauauucaaaag

SEQ ID NO: 4912 - RNA, 23 nt, Artificial Sequence
  siRNA antisense strand against b2GPI
ugaucguguugggauauucaaaa

SEQ ID NO: 4913 - RNA, 23 nt, Artificial Sequence
  siRNA antisense strand against b2GPI
aacugaucguguugggauauuca

SEQ ID NO: 4914 - RNA, 23 nt, Artificial Sequence
  siRNA antisense strand against b2GPI
aaacugaucguguugggauauuc

SEQ ID NO: 4915 - RNA, 23 nt, Artificial Sequence
  siRNA antisense strand against b2GPI
aaaacugaucguguugggauauu

SEQ ID NO: 4916 - RNA, 23 nt, Artificial Sequence
  siRNA antisense strand against b2GPI
aaaaacugaucguguugggauau

SEQ ID NO: 4917 - RNA, 23 nt, Artificial Sequence
  siRNA antisense strand against b2GPI
gaaaaacugaucguguugggaua

SEQ ID NO: 4918 - RNA, 23 nt, Artificial Sequence
  siRNA antisense strand against b2GPI
agaaaaacugaucguguugggau

SEQ ID NO: 4919 - RNA, 23 nt, Artificial Sequence
  siRNA antisense strand against b2GPI
aagaaaaacugaucguguuggga

SEQ ID NO: 4920 - RNA, 23 nt, Artificial Sequence
  siRNA antisense strand against b2GPI
acaagaaaaacugaucguguugg

SEQ ID NO: 4921 - RNA, 23 nt, Artificial Sequence
  siRNA antisense strand against b2GPI
uacaagaaaaacugaucguguug

SEQ ID NO: 4922 - RNA, 23 nt, Artificial Sequence
  siRNA antisense strand against b2GPI
uuacaagaaaaacugaucguguu

SEQ ID NO: 4923 - RNA, 23 nt, Artificial Sequence
  siRNA antisense strand against b2GPI
guuacaagaaaaacugaucgugu

SEQ ID NO: 4924 - RNA, 23 nt, Artificial Sequence
  siRNA antisense strand against b2GPI
uguuacaagaaaaacugaucgug

SEQ ID NO: 4925 - RNA, 23 nt, Artificial Sequence
  siRNA antisense strand against b2GPI
aguguuacaagaaaaacugaucg

SEQ ID NO: 4926 - RNA, 23 nt, Artificial Sequence
  siRNA antisense strand against b2GPI
caguguuacaagaaaaacugauc

SEQ ID NO: 4927 - RNA, 23 nt, Artificial Sequence
  siRNA antisense strand against b2GPI
aaaacccaguguuacaagaaaaa

SEQ ID NO: 4928 - RNA, 23 nt, Artificial Sequence
  siRNA antisense strand against b2GPI
uaaaacccaguguuacaagaaaa

SEQ ID NO: 4929 - RNA, 23 nt, Artificial Sequence
  siRNA antisense strand against b2GPI
auaaaacccaguguuacaagaaa

SEQ ID NO: 4930 - RNA, 23 nt, Artificial Sequence
  siRNA antisense strand against b2GPI
gauaaaacccaguguuacaagaa

SEQ ID NO: 4931 - RNA, 23 nt, Artificial Sequence
  siRNA antisense strand against b2GPI
agauaaaacccaguguuacaaga

SEQ ID NO: 4932 - RNA, 23 nt, Artificial Sequence
  siRNA antisense strand against b2GPI
ucagauaaaacccaguguuacaa

SEQ ID NO: 4933 - RNA, 23 nt, Artificial Sequence
  siRNA antisense strand against b2GPI
uucagauaaaacccaguguuaca

SEQ ID NO: 4934 - RNA, 23 nt, Artificial Sequence
  siRNA antisense strand against b2GPI
auucagauaaaacccaguguuac

SEQ ID NO: 4935 - RNA, 23 nt, Artificial Sequence
  siRNA antisense strand against b2GPI
ccauucagauaaaacccaguguu

SEQ ID NO: 4936 - RNA, 23 nt, Artificial Sequence
  siRNA antisense strand against b2GPI
cgccauucagauaaaacccagug

SEQ ID NO: 4937 - RNA, 23 nt, Artificial Sequence
  siRNA antisense strand against b2GPI
gcgccauucagauaaaacccagu

SEQ ID NO: 4938 - RNA, 23 nt, Artificial Sequence
  siRNA antisense strand against b2GPI
agcgccauucagauaaaacccag

SEQ ID NO: 4939 - RNA, 23 nt, Artificial Sequence
  siRNA antisense strand against b2GPI
aucagcgccauucagauaaaacc

SEQ ID NO: 4940 - RNA, 23 nt, Artificial Sequence
  siRNA antisense strand against b2GPI
agaaucagcgccauucagauaaa

SEQ ID NO: 4941 - RNA, 23 nt, Artificial Sequence
  siRNA antisense strand against b2GPI
uggcagaaucagcgccauucaga

SEQ ID NO: 4942 - RNA, 23 nt, Artificial Sequence
  siRNA antisense strand against b2GPI
acuuggcagaaucagcgccauuc

SEQ ID NO: 4943 - RNA, 23 nt, Artificial Sequence
  siRNA antisense strand against b2GPI
cacuuggcagaaucagcgccauu

SEQ ID NO: 4944 - RNA, 23 nt, Artificial Sequence
  siRNA antisense strand against b2GPI
gcacuuggcagaaucagcgccau

SEQ ID NO: 4945 - RNA, 23 nt, Artificial Sequence
  siRNA antisense strand against b2GPI
ugcacuuggcagaaucagcgcca

SEQ ID NO: 4946 - RNA, 23 nt, Artificial Sequence
  siRNA antisense strand against b2GPI
gugcacuuggcagaaucagcgcc

SEQ ID NO: 4947 - RNA, 23 nt, Artificial Sequence
  siRNA antisense strand against b2GPI
agugcacuuggcagaaucagcgc

SEQ ID NO: 4948 - RNA, 23 nt, Artificial Sequence
  siRNA antisense strand against b2GPI
cagugcacuuggcagaaucagcg

SEQ ID NO: 4949 - RNA, 23 nt, Artificial Sequence
  siRNA antisense strand against b2GPI
uccucagugcacuuggcagaauc

SEQ ID NO: 4950 - RNA, 23 nt, Artificial Sequence
  siRNA antisense strand against b2GPI
uuccucagugcacuuggcagaau

SEQ ID NO: 4951 - RNA, 23 nt, Artificial Sequence
  siRNA antisense strand against b2GPI
ccuuccucagugcacuuggcaga

SEQ ID NO: 4952 - RNA, 23 nt, Artificial Sequence
  siRNA antisense strand against b2GPI
uccuuccucagugcacuuggcag

SEQ ID NO: 4953 - RNA, 23 nt, Artificial Sequence
  siRNA antisense strand against b2GPI
uuccuuccucagugcacuuggca

SEQ ID NO: 4954 - RNA, 23 nt, Artificial Sequence
  siRNA antisense strand against b2GPI
uuuccuuccucagugcacuuggc

SEQ ID NO: 4955 - RNA, 23 nt, Artificial Sequence
  siRNA antisense strand against b2GPI
uuuuccuuccucagugcacuugg

SEQ ID NO: 4956 - RNA, 23 nt, Artificial Sequence
  siRNA antisense strand against b2GPI
auuuuccuuccucagugcacuug

SEQ ID NO: 4957 - RNA, 23 nt, Artificial Sequence
  siRNA antisense strand against b2GPI
ccgggcuccauuuuccuuccuca

SEQ ID NO: 4958 - RNA, 23 nt, Artificial Sequence
  siRNA antisense strand against b2GPI
cagacaggaagcuccgggcucca

SEQ ID NO: 4959 - RNA, 23 nt, Artificial Sequence
  siRNA antisense strand against b2GPI
acagacaggaagcuccgggcucc

SEQ ID NO: 4960 - RNA, 23 nt, Artificial Sequence
  siRNA antisense strand against b2GPI
agcacagacaggaagcuccgggc

SEQ ID NO: 4961 - RNA, 23 nt, Artificial Sequence
  siRNA antisense strand against b2GPI
gagcacagacaggaagcuccggg

SEQ ID NO: 4962 - RNA, 23 nt, Artificial Sequence
  siRNA antisense strand against b2GPI
ugggagcacagacaggaagcucc

SEQ ID NO: 4963 - RNA, 23 nt, Artificial Sequence
  siRNA antisense strand against b2GPI
augaugggagcacagacaggaag

SEQ ID NO: 4964 - RNA, 23 nt, Artificial Sequence
  siRNA antisense strand against b2GPI
agaugaugggagcacagacagga

SEQ ID NO: 4965 - RNA, 23 nt, Artificial Sequence
  siRNA antisense strand against b2GPI
guggagggcagaugaugggagca

SEQ ID NO: 4966 - RNA, 23 nt, Artificial Sequence
  siRNA antisense strand against b2GPI
augguggagggcagaugauggga

SEQ ID NO: 4967 - RNA, 23 nt, Artificial Sequence
  siRNA antisense strand against b2GPI
gaugguggagggcagaugauggg

SEQ ID NO: 4968 - RNA, 23 nt, Artificial Sequence
  siRNA antisense strand against b2GPI
uauggaugguggagggcagauga

SEQ ID NO: 4969 - RNA, 23 nt, Artificial Sequence
  siRNA antisense strand against b2GPI
uagguauggaugguggagggcag

SEQ ID NO: 4970 - RNA, 23 nt, Artificial Sequence
  siRNA antisense strand against b2GPI
acguagguauggaugguggaggg

SEQ ID NO: 4971 - RNA, 23 nt, Artificial Sequence
  siRNA antisense strand against b2GPI
aacguagguauggaugguggagg

SEQ ID NO: 4972 - RNA, 23 nt, Artificial Sequence
  siRNA antisense strand against b2GPI
aaacguagguauggaugguggag

SEQ ID NO: 4973 - RNA, 23 nt, Artificial Sequence
  siRNA antisense strand against b2GPI
caaacguagguauggauggugga

SEQ ID NO: 4974 - RNA, 23 nt, Artificial Sequence
  siRNA antisense strand against b2GPI
gcaaacguagguauggauggugg

SEQ ID NO: 4975 - RNA, 23 nt, Artificial Sequence
  siRNA antisense strand against b2GPI
ugcaaacguagguauggauggug

SEQ ID NO: 4976 - RNA, 23 nt, Artificial Sequence
  siRNA antisense strand against b2GPI
uugcaaacguagguauggauggu

SEQ ID NO: 4977 - RNA, 23 nt, Artificial Sequence
  siRNA antisense strand against b2GPI
uguugcaaacguagguauggaug

SEQ ID NO: 4978 - RNA, 23 nt, Artificial Sequence
  siRNA antisense strand against b2GPI
aaguguugcaaacguagguaugg

SEQ ID NO: 4979 - RNA, 23 nt, Artificial Sequence
  siRNA antisense strand against b2GPI
gaaguguugcaaacguagguaug

SEQ ID NO: 4980 - RNA, 23 nt, Artificial Sequence
  siRNA antisense strand against b2GPI
cgaaguguugcaaacguagguau

SEQ ID NO: 4981 - RNA, 23 nt, Artificial Sequence
  siRNA antisense strand against b2GPI
acgaaguguugcaaacguaggua

SEQ ID NO: 4982 - RNA, 23 nt, Artificial Sequence
  siRNA antisense strand against b2GPI
cacgaaguguugcaaacguaggu

SEQ ID NO: 4983 - RNA, 23 nt, Artificial Sequence
  siRNA antisense strand against b2GPI
acacgaaguguugcaaacguagg

SEQ ID NO: 4984 - RNA, 23 nt, Artificial Sequence
  siRNA antisense strand against b2GPI
aacacgaaguguugcaaacguag

SEQ ID NO: 4985 - RNA, 23 nt, Artificial Sequence
  siRNA antisense strand against b2GPI
aaacacgaaguguugcaaacgua

SEQ ID NO: 4986 - RNA, 23 nt, Artificial Sequence
  siRNA antisense strand against b2GPI
uaaacacgaaguguugcaaacgu

SEQ ID NO: 4987 - RNA, 23 nt, Artificial Sequence
  siRNA antisense strand against b2GPI
auaaacacgaaguguugcaaacg

SEQ ID NO: 4988 - RNA, 23 nt, Artificial Sequence
  siRNA antisense strand against b2GPI
uauaaacacgaaguguugcaaac

SEQ ID NO: 4989 - RNA, 23 nt, Artificial Sequence
  siRNA antisense strand against b2GPI
uuauaaacacgaaguguugcaaa

SEQ ID NO: 4990 - RNA, 23 nt, Artificial Sequence
  siRNA antisense strand against b2GPI
cuuauaaacacgaaguguugcaa

SEQ ID NO: 4991 - RNA, 23 nt, Artificial Sequence
  siRNA antisense strand against b2GPI
uggcuuauaaacacgaaguguug

SEQ ID NO: 4992 - RNA, 23 nt, Artificial Sequence
  siRNA antisense strand against b2GPI
auggcuuauaaacacgaaguguu

SEQ ID NO: 4993 - RNA, 23 nt, Artificial Sequence
  siRNA antisense strand against b2GPI
gcugauggcuuauaaacacgaag

SEQ ID NO: 4994 - RNA, 23 nt, Artificial Sequence
  siRNA antisense strand against b2GPI
agcugauggcuuauaaacacgaa

SEQ ID NO: 4995 - RNA, 23 nt, Artificial Sequence
  siRNA antisense strand against b2GPI
cagcugauggcuuauaaacacga

SEQ ID NO: 4996 - RNA, 23 nt, Artificial Sequence
  siRNA antisense strand against b2GPI
uguuuccagcugauggcuuauaa

SEQ ID NO: 4997 - RNA, 23 nt, Artificial Sequence
  siRNA antisense strand against b2GPI
uuguuuccagcugauggcuuaua

SEQ ID NO: 4998 - RNA, 23 nt, Artificial Sequence
  siRNA antisense strand against b2GPI
auuguuuccagcugauggcuuau

SEQ ID NO: 4999 - RNA, 23 nt, Artificial Sequence
  siRNA antisense strand against b2GPI
aauuguuuccagcugauggcuua

SEQ ID NO: 5000 - RNA, 23 nt, Artificial Sequence
  siRNA antisense strand against b2GPI
gaauuguuuccagcugauggcuu

SEQ ID NO: 5001 - RNA, 23 nt, Artificial Sequence
  siRNA antisense strand against b2GPI
gagggaauuguuuccagcugaug

SEQ ID NO: 5002 - RNA, 23 nt, Artificial Sequence
  siRNA antisense strand against b2GPI
agagggaauuguuuccagcugau

SEQ ID NO: 5003 - RNA, 23 nt, Artificial Sequence
  siRNA antisense strand against b2GPI
gauagagggaauuguuuccagcu

SEQ ID NO: 5004 - RNA, 23 nt, Artificial Sequence
  siRNA antisense strand against b2GPI
ucccgauagagggaauuguuucc

SEQ ID NO: 5005 - RNA, 23 nt, Artificial Sequence
  siRNA antisense strand against b2GPI
ugcugugucccgauagagggaau

SEQ ID NO: 5006 - RNA, 23 nt, Artificial Sequence
  siRNA antisense strand against b2GPI
aacugcugugucccgauagaggg

SEQ ID NO: 5007 - RNA, 23 nt, Artificial Sequence
  siRNA antisense strand against b2GPI
aaacugcugugucccgauagagg

SEQ ID NO: 5008 - RNA, 23 nt, Artificial Sequence
  siRNA antisense strand against b2GPI
aaaacugcugugucccgauagag

SEQ ID NO: 5009 - RNA, 23 nt, Artificial Sequence
  siRNA antisense strand against b2GPI
aaaaacugcugugucccgauaga

SEQ ID NO: 5010 - RNA, 23 nt, Artificial Sequence
  siRNA antisense strand against b2GPI
ucaaaaacugcugugucccgaua

SEQ ID NO: 5011 - RNA, 23 nt, Artificial Sequence
  siRNA antisense strand against b2GPI
uucaaaaacugcugugucccgau

SEQ ID NO: 5012 - RNA, 23 nt, Artificial Sequence
  siRNA antisense strand against b2GPI
auucaaaaacugcugugucccga

SEQ ID NO: 5013 - RNA, 23 nt, Artificial Sequence
  siRNA antisense strand against b2GPI
acauucaaaaacugcuguguccc

SEQ ID NO: 5014 - RNA, 23 nt, Artificial Sequence
  siRNA antisense strand against b2GPI
aacauucaaaaacugcugugucc

SEQ ID NO: 5015 - RNA, 23 nt, Artificial Sequence
  siRNA antisense strand against b2GPI
aaacauucaaaaacugcuguguc

SEQ ID NO: 5016 - RNA, 23 nt, Artificial Sequence
  siRNA antisense strand against b2GPI
caaacauucaaaaacugcugugu

SEQ ID NO: 5017 - RNA, 23 nt, Artificial Sequence
  siRNA antisense strand against b2GPI
gcaaacauucaaaaacugcugug

SEQ ID NO: 5018 - RNA, 23 nt, Artificial Sequence
  siRNA antisense strand against b2GPI
uggcaaacauucaaaaacugcug

SEQ ID NO: 5019 - RNA, 23 nt, Artificial Sequence
  siRNA antisense strand against b2GPI
guggcaaacauucaaaaacugcu

SEQ ID NO: 5020 - RNA, 23 nt, Artificial Sequence
  siRNA antisense strand against b2GPI
uuguggcaaacauucaaaaacug

SEQ ID NO: 5021 - RNA, 23 nt, Artificial Sequence
  siRNA antisense strand against b2GPI
uguuguggcaaacauucaaaaac

SEQ ID NO: 5022 - RNA, 23 nt, Artificial Sequence
  siRNA antisense strand against b2GPI
auguuguggcaaacauucaaaaa

SEQ ID NO: 5023 - RNA, 23 nt, Artificial Sequence
  siRNA antisense strand against b2GPI
cauguuguggcaaacauucaaaa

SEQ ID NO: 5024 - RNA, 23 nt, Artificial Sequence
  siRNA antisense strand against b2GPI
aucgcauguuguggcaaacauuc

SEQ ID NO: 5025 - RNA, 23 nt, Artificial Sequence
  siRNA antisense strand against b2GPI
aaacaucgcauguuguggcaaac

SEQ ID NO: 5026 - RNA, 23 nt, Artificial Sequence
  siRNA antisense strand against b2GPI
caaacaucgcauguuguggcaaa

SEQ ID NO: 5027 - RNA, 23 nt, Artificial Sequence
  siRNA antisense strand against b2GPI
uccaaacaucgcauguuguggca

SEQ ID NO: 5028 - RNA, 23 nt, Artificial Sequence
  siRNA antisense strand against b2GPI
uuccaaacaucgcauguuguggc

SEQ ID NO: 5029 - RNA, 23 nt, Artificial Sequence
  siRNA antisense strand against b2GPI
auuuccaaacaucgcauguugug

SEQ ID NO: 5030 - RNA, 23 nt, Artificial Sequence
  siRNA antisense strand against b2GPI
ucauuuccaaacaucgcauguug

SEQ ID NO: 5031 - RNA, 23 nt, Artificial Sequence
  siRNA antisense strand against b2GPI
aucauuuccaaacaucgcauguu

SEQ ID NO: 5032 - RNA, 23 nt, Artificial Sequence
  siRNA antisense strand against b2GPI
uaucauuuccaaacaucgcaugu

SEQ ID NO: 5033 - RNA, 23 nt, Artificial Sequence
  siRNA antisense strand against b2GPI
guaucauuuccaaacaucgcaug

SEQ ID NO: 5034 - RNA, 23 nt, Artificial Sequence
  siRNA antisense strand against b2GPI
uguaucauuuccaaacaucgcau

SEQ ID NO: 5035 - RNA, 23 nt, Artificial Sequence
  siRNA antisense strand against b2GPI
uuguaucauuuccaaacaucgca

SEQ ID NO: 5036 - RNA, 23 nt, Artificial Sequence
  siRNA antisense strand against b2GPI
aauuguaucauuuccaaacaucg

SEQ ID NO: 5037 - RNA, 23 nt, Artificial Sequence
  siRNA antisense strand against b2GPI
uaauuguaucauuuccaaacauc

SEQ ID NO: 5038 - RNA, 23 nt, Artificial Sequence
  siRNA antisense strand against b2GPI
agguaauuguaucauuuccaaac

SEQ ID NO: 5039 - RNA, 23 nt, Artificial Sequence
  siRNA antisense strand against b2GPI
ucgugcagguaauuguaucauuu

SEQ ID NO: 5040 - RNA, 23 nt, Artificial Sequence
  siRNA antisense strand against b2GPI
ugucgugcagguaauuguaucau

SEQ ID NO: 5041 - RNA, 23 nt, Artificial Sequence
  siRNA antisense strand against b2GPI
gugucgugcagguaauuguauca

SEQ ID NO: 5042 - RNA, 23 nt, Artificial Sequence
  siRNA antisense strand against b2GPI
ugugucgugcagguaauuguauc

SEQ ID NO: 5043 - RNA, 23 nt, Artificial Sequence
  siRNA antisense strand against b2GPI
augugucgugcagguaauuguau

SEQ ID NO: 5044 - RNA, 23 nt, Artificial Sequence
  siRNA antisense strand against b2GPI
uuccaugugucgugcagguaauu

SEQ ID NO: 5045 - RNA, 23 nt, Artificial Sequence
  siRNA antisense strand against b2GPI
uuuccaugugucgugcagguaau

SEQ ID NO: 5046 - RNA, 23 nt, Artificial Sequence
  siRNA antisense strand against b2GPI
auuuccaugugucgugcagguaa

SEQ ID NO: 5047 - RNA, 23 nt, Artificial Sequence
  siRNA antisense strand against b2GPI
uccaauuuccaugugucgugcag

SEQ ID NO: 5048 - RNA, 23 nt, Artificial Sequence
  siRNA antisense strand against b2GPI
aguccaauuuccaugugucgugc

SEQ ID NO: 5049 - RNA, 23 nt, Artificial Sequence
  siRNA antisense strand against b2GPI
uaguccaauuuccaugugucgug

SEQ ID NO: 5050 - RNA, 23 nt, Artificial Sequence
  siRNA antisense strand against b2GPI
uuuaguccaauuuccaugugucg

SEQ ID NO: 5051 - RNA, 23 nt, Artificial Sequence
  siRNA antisense strand against b2GPI
auuuaguccaauuuccauguguc

SEQ ID NO: 5052 - RNA, 23 nt, Artificial Sequence
  siRNA antisense strand against b2GPI
aauuuaguccaauuuccaugugu

SEQ ID NO: 5053 - RNA, 23 nt, Artificial Sequence
  siRNA antisense strand against b2GPI
uaauuuaguccaauuuccaugug

SEQ ID NO: 5054 - RNA, 23 nt, Artificial Sequence
  siRNA antisense strand against b2GPI
guaauuuaguccaauuuccaugu

SEQ ID NO: 5055 - RNA, 23 nt, Artificial Sequence
  siRNA antisense strand against b2GPI
ugguaauuuaguccaauuuccau

SEQ ID NO: 5056 - RNA, 23 nt, Artificial Sequence
  siRNA antisense strand against b2GPI
cauucugguaauuuaguccaauu

SEQ ID NO: 5057 - RNA, 23 nt, Artificial Sequence
  siRNA antisense strand against b2GPI
uuacuucccugcauucugguaau

SEQ ID NO: 5058 - RNA, 23 nt, Artificial Sequence
  siRNA antisense strand against b2GPI
uuuacuucccugcauucugguaa

SEQ ID NO: 5059 - RNA, 23 nt, Artificial Sequence
  siRNA antisense strand against b2GPI
uuuuacuucccugcauucuggua

SEQ ID NO: 5060 - RNA, 23 nt, Artificial Sequence
  siRNA antisense strand against b2GPI
auuuuacuucccugcauucuggu

SEQ ID NO: 5061 - RNA, 23 nt, Artificial Sequence
  siRNA antisense strand against b2GPI
cauuuuacuucccugcauucugg

SEQ ID NO: 5062 - RNA, 23 nt, Artificial Sequence
  siRNA antisense strand against b2GPI
ugggcauuuuacuucccugcauu

SEQ ID NO: 5063 - RNA, 23 nt, Artificial Sequence
  siRNA antisense strand against b2GPI
ggaaugggcauuuuacuucccug

SEQ ID NO: 5064 - RNA, 23 nt, Artificial Sequence
  siRNA antisense strand against b2GPI
augggaaugggcauuuuacuucc

SEQ ID NO: 5065 - RNA, 23 nt, Artificial Sequence
  siRNA antisense strand against b2GPI
ucuugaugggaaugggcauuuua

SEQ ID NO: 5066 - RNA, 23 nt, Artificial Sequence
  siRNA antisense strand against b2GPI
gucuugaugggaaugggcauuuu

SEQ ID NO: 5067 - RNA, 23 nt, Artificial Sequence
  siRNA antisense strand against b2GPI
uggucuugaugggaaugggcauu

SEQ ID NO: 5068 - RNA, 23 nt, Artificial Sequence
  siRNA antisense strand against b2GPI
cuggucuugaugggaaugggcau

SEQ ID NO: 5069 - RNA, 23 nt, Artificial Sequence
  siRNA antisense strand against b2GPI
ucuggucuugaugggaaugggca

SEQ ID NO: 5070 - RNA, 23 nt, Artificial Sequence
  siRNA antisense strand against b2GPI
auugucuggucuugaugggaaug

SEQ ID NO: 5071 - RNA, 23 nt, Artificial Sequence
  siRNA antisense strand against b2GPI
cauugucuggucuugaugggaau

SEQ ID NO: 5072 - RNA, 23 nt, Artificial Sequence
  siRNA antisense strand against b2GPI
ccauugucuggucuugaugggaa

SEQ ID NO: 5073 - RNA, 23 nt, Artificial Sequence
  siRNA antisense strand against b2GPI
uccauugucuggucuugauggga

SEQ ID NO: 5074 - RNA, 23 nt, Artificial Sequence
  siRNA antisense strand against b2GPI
auccauugucuggucuugauggg

SEQ ID NO: 5075 - RNA, 23 nt, Artificial Sequence
  siRNA antisense strand against b2GPI
aauccauugucuggucuugaugg

SEQ ID NO: 5076 - RNA, 23 nt, Artificial Sequence
  siRNA antisense strand against b2GPI
aaauccauugucuggucuugaug

SEQ ID NO: 5077 - RNA, 23 nt, Artificial Sequence
  siRNA antisense strand against b2GPI
caaauccauugucuggucuugau

SEQ ID NO: 5078 - RNA, 23 nt, Artificial Sequence
  siRNA antisense strand against b2GPI
cacaaauccauugucuggucuug

SEQ ID NO: 5079 - RNA, 23 nt, Artificial Sequence
  siRNA antisense strand against b2GPI
ucacaaauccauugucuggucuu

SEQ ID NO: 5080 - RNA, 23 nt, Artificial Sequence
  siRNA antisense strand against b2GPI
uucacaaauccauugucuggucu

SEQ ID NO: 5081 - RNA, 23 nt, Artificial Sequence
  siRNA antisense strand against b2GPI
guucacaaauccauugucugguc

SEQ ID NO: 5082 - RNA, 23 nt, Artificial Sequence
  siRNA antisense strand against b2GPI
uaguucacaaauccauugucugg

SEQ ID NO: 5083 - RNA, 23 nt, Artificial Sequence
  siRNA antisense strand against b2GPI
auaguucacaaauccauugucug

SEQ ID NO: 5084 - RNA, 23 nt, Artificial Sequence
  siRNA antisense strand against b2GPI
gauaguucacaaauccauugucu

SEQ ID NO: 5085 - RNA, 23 nt, Artificial Sequence
  siRNA antisense strand against b2GPI
caggauaguucacaaauccauug

SEQ ID NO: 5086 - RNA, 23 nt, Artificial Sequence
  siRNA antisense strand against b2GPI
ugcaggauaguucacaaauccau

SEQ ID NO: 5087 - RNA, 23 nt, Artificial Sequence
  siRNA antisense strand against b2GPI
uugcaggauaguucacaaaucca

SEQ ID NO: 5088 - RNA, 23 nt, Artificial Sequence
  siRNA antisense strand against b2GPI
uuugcaggauaguucacaaaucc

SEQ ID NO: 5089 - RNA, 23 nt, Artificial Sequence
  siRNA antisense strand against b2GPI
uuuugcaggauaguucacaaauc

SEQ ID NO: 5090 - RNA, 23 nt, Artificial Sequence
  siRNA antisense strand against b2GPI
ugguuuugcaggauaguucacaa

SEQ ID NO: 5091 - RNA, 23 nt, Artificial Sequence
  siRNA antisense strand against b2GPI
uugguuuugcaggauaguucaca

SEQ ID NO: 5092 - RNA, 23 nt, Artificial Sequence
  siRNA antisense strand against b2GPI
uguugguuuugcaggauaguuca

SEQ ID NO: 5093 - RNA, 23 nt, Artificial Sequence
  siRNA antisense strand against b2GPI
guguugguuuugcaggauaguuc

SEQ ID NO: 5094 - RNA, 23 nt, Artificial Sequence
  siRNA antisense strand against b2GPI
aaguguugguuuugcaggauagu

SEQ ID NO: 5095 - RNA, 23 nt, Artificial Sequence
  siRNA antisense strand against b2GPI
aaaguguugguuuugcaggauag

SEQ ID NO: 5096 - RNA, 23 nt, Artificial Sequence
  siRNA antisense strand against b2GPI
uaaaguguugguuuugcaggaua

SEQ ID NO: 5097 - RNA, 23 nt, Artificial Sequence
  siRNA antisense strand against b2GPI
auaaaguguugguuuugcaggau

SEQ ID NO: 5098 - RNA, 23 nt, Artificial Sequence
  siRNA antisense strand against b2GPI
aauaaaguguugguuuugcagga

SEQ ID NO: 5099 - RNA, 23 nt, Artificial Sequence
  siRNA antisense strand against b2GPI
uaauaaaguguugguuuugcagg

SEQ ID NO: 5100 - RNA, 23 nt, Artificial Sequence
  siRNA antisense strand against b2GPI
uguaauaaaguguugguuuugca

SEQ ID NO: 5101 - RNA, 23 nt, Artificial Sequence
  siRNA antisense strand against b2GPI
uuguaauaaaguguugguuuugc

SEQ ID NO: 5102 - RNA, 23 nt, Artificial Sequence
  siRNA antisense strand against b2GPI
ccuuguaauaaaguguugguuuu

SEQ ID NO: 5103 - RNA, 23 nt, Artificial Sequence
  siRNA antisense strand against b2GPI
auccuuguaauaaaguguugguu

SEQ ID NO: 5104 - RNA, 23 nt, Artificial Sequence
  siRNA antisense strand against b2GPI
uauccuuguaauaaaguguuggu

SEQ ID NO: 5105 - RNA, 23 nt, Artificial Sequence
  siRNA antisense strand against b2GPI
uuauccuuguaauaaaguguugg

SEQ ID NO: 5106 - RNA, 23 nt, Artificial Sequence
  siRNA antisense strand against b2GPI
aaauguggcuuuauccuuguaau

SEQ ID NO: 5107 - RNA, 23 nt, Artificial Sequence
  siRNA antisense strand against b2GPI
ccaaauguggcuuuauccuugua

SEQ ID NO: 5108 - RNA, 23 nt, Artificial Sequence
  siRNA antisense strand against b2GPI
agccaaauguggcuuuauccuug

SEQ ID NO: 5109 - RNA, 23 nt, Artificial Sequence
  siRNA antisense strand against b2GPI
uggcagccaaauguggcuuuauc

SEQ ID NO: 5110 - RNA, 23 nt, Artificial Sequence
  siRNA antisense strand against b2GPI
auggcagccaaauguggcuuuau

SEQ ID NO: 5111 - RNA, 23 nt, Artificial Sequence
  siRNA antisense strand against b2GPI
cauggcagccaaauguggcuuua

SEQ ID NO: 5112 - RNA, 23 nt, Artificial Sequence
  siRNA antisense strand against b2GPI
ucauggcagccaaauguggcuuu

SEQ ID NO: 5113 - RNA, 23 nt, Artificial Sequence
  siRNA antisense strand against b2GPI
aucauggcagccaaauguggcuu

SEQ ID NO: 5114 - RNA, 23 nt, Artificial Sequence
  siRNA antisense strand against b2GPI
caucauggcagccaaauguggcu

SEQ ID NO: 5115 - RNA, 23 nt, Artificial Sequence
  siRNA antisense strand against b2GPI
ccaucauggcagccaaauguggc

SEQ ID NO: 5116 - RNA, 23 nt, Artificial Sequence
  siRNA antisense strand against b2GPI
uccaucauggcagccaaaugugg

SEQ ID NO: 5117 - RNA, 23 nt, Artificial Sequence
  siRNA antisense strand against b2GPI
auauccaucauggcagccaaaug

SEQ ID NO: 5118 - RNA, 23 nt, Artificial Sequence
  siRNA antisense strand against b2GPI
aauauccaucauggcagccaaau

SEQ ID NO: 5119 - RNA, 23 nt, Artificial Sequence
  siRNA antisense strand against b2GPI
agaauauccaucauggcagccaa

SEQ ID NO: 5120 - RNA, 23 nt, Artificial Sequence
  siRNA antisense strand against b2GPI
gagaauauccaucauggcagcca

SEQ ID NO: 5121 - RNA, 23 nt, Artificial Sequence
  siRNA antisense strand against b2GPI
cagagaauauccaucauggcagc

SEQ ID NO: 5122 - RNA, 23 nt, Artificial Sequence
  siRNA antisense strand against b2GPI
ccagagaauauccaucauggcag

SEQ ID NO: 5123 - RNA, 23 nt, Artificial Sequence
  siRNA antisense strand against b2GPI
auccagagaauauccaucauggc

SEQ ID NO: 5124 - RNA, 23 nt, Artificial Sequence
  siRNA antisense strand against b2GPI
cauccagagaauauccaucaugg

SEQ ID NO: 5125 - RNA, 23 nt, Artificial Sequence
  siRNA antisense strand against b2GPI
ggccauccagagaauauccauca

SEQ ID NO: 5126 - RNA, 23 nt, Artificial Sequence
  siRNA antisense strand against b2GPI
uuccgggccauccagagaauauc

SEQ ID NO: 5127 - RNA, 23 nt, Artificial Sequence
  siRNA antisense strand against b2GPI
ucuuccgggccauccagagaaua

SEQ ID NO: 5128 - RNA, 23 nt, Artificial Sequence
  siRNA antisense strand against b2GPI
uucuuccgggccauccagagaau

SEQ ID NO: 5129 - RNA, 23 nt, Artificial Sequence
  siRNA antisense strand against b2GPI
uuucuuccgggccauccagagaa

SEQ ID NO: 5130 - RNA, 23 nt, Artificial Sequence
  siRNA antisense strand against b2GPI
auuucuuccgggccauccagaga

SEQ ID NO: 5131 - RNA, 23 nt, Artificial Sequence
  siRNA antisense strand against b2GPI
uauuucuuccgggccauccagag

SEQ ID NO: 5132 - RNA, 23 nt, Artificial Sequence
  siRNA antisense strand against b2GPI
ucuauuucuuccgggccauccag

SEQ ID NO: 5133 - RNA, 23 nt, Artificial Sequence
  siRNA antisense strand against b2GPI
uucuauuucuuccgggccaucca

SEQ ID NO: 5134 - RNA, 23 nt, Artificial Sequence
  siRNA antisense strand against b2GPI
auucuauuucuuccgggccaucc

SEQ ID NO: 5135 - RNA, 23 nt, Artificial Sequence
  siRNA antisense strand against b2GPI
cauucuauuucuuccgggccauc

SEQ ID NO: 5136 - RNA, 23 nt, Artificial Sequence
  siRNA antisense strand against b2GPI
acauucuauuucuuccgggccau

SEQ ID NO: 5137 - RNA, 23 nt, Artificial Sequence
  siRNA antisense strand against b2GPI
guacauucuauuucuuccgggcc

SEQ ID NO: 5138 - RNA, 23 nt, Artificial Sequence
  siRNA antisense strand against b2GPI
gguacauucuauuucuuccgggc

SEQ ID NO: 5139 - RNA, 23 nt, Artificial Sequence
  siRNA antisense strand against b2GPI
ugguacauucuauuucuuccggg

SEQ ID NO: 5140 - RNA, 23 nt, Artificial Sequence
  siRNA antisense strand against b2GPI
guuugguacauucuauuucuucc

SEQ ID NO: 5141 - RNA, 23 nt, Artificial Sequence
  siRNA antisense strand against b2GPI
ucccaguuugguacauucuauuu

SEQ ID NO: 5142 - RNA, 23 nt, Artificial Sequence
  siRNA antisense strand against b2GPI
uucccaguuugguacauucuauu

SEQ ID NO: 5143 - RNA, 23 nt, Artificial Sequence
  siRNA antisense strand against b2GPI
uuucccaguuugguacauucuau

SEQ ID NO: 5144 - RNA, 23 nt, Artificial Sequence
  siRNA antisense strand against b2GPI
caguuucccaguuugguacauuc

SEQ ID NO: 5145 - RNA, 23 nt, Artificial Sequence
  siRNA antisense strand against b2GPI
agaccaguuucccaguuugguac

SEQ ID NO: 5146 - RNA, 23 nt, Artificial Sequence
  siRNA antisense strand against b2GPI
cagaccaguuucccaguuuggua

SEQ ID NO: 5147 - RNA, 23 nt, Artificial Sequence
  siRNA antisense strand against b2GPI
uggcagaccaguuucccaguuug

SEQ ID NO: 5148 - RNA, 23 nt, Artificial Sequence
  siRNA antisense strand against b2GPI
auggcagaccaguuucccaguuu

SEQ ID NO: 5149 - RNA, 23 nt, Artificial Sequence
  siRNA antisense strand against b2GPI
cauggcagaccaguuucccaguu

SEQ ID NO: 5150 - RNA, 23 nt, Artificial Sequence
  siRNA antisense strand against b2GPI
gcauggcagaccaguuucccagu

SEQ ID NO: 5151 - RNA, 23 nt, Artificial Sequence
  siRNA antisense strand against b2GPI
uggcauggcagaccaguuuccca

SEQ ID NO: 5152 - RNA, 23 nt, Artificial Sequence
  siRNA antisense strand against b2GPI
uuggcauggcagaccaguuuccc

SEQ ID NO: 5153 - RNA, 23 nt, Artificial Sequence
  siRNA antisense strand against b2GPI
cuuggcauggcagaccaguuucc

SEQ ID NO: 5154 - RNA, 23 nt, Artificial Sequence
  siRNA antisense strand against b2GPI
acuuggcauggcagaccaguuuc

SEQ ID NO: 5155 - RNA, 23 nt, Artificial Sequence
  siRNA antisense strand against b2GPI
aacuuggcauggcagaccaguuu

SEQ ID NO: 5156 - RNA, 23 nt, Artificial Sequence
  siRNA antisense strand against b2GPI
caacuuggcauggcagaccaguu

SEQ ID NO: 5157 - RNA, 23 nt, Artificial Sequence
  siRNA antisense strand against b2GPI
acaacuuggcauggcagaccagu

SEQ ID NO: 5158 - RNA, 23 nt, Artificial Sequence
  siRNA antisense strand against b2GPI
uacaacuuggcauggcagaccag

SEQ ID NO: 5159 - RNA, 23 nt, Artificial Sequence
  siRNA antisense strand against b2GPI
uuacaacuuggcauggcagacca

SEQ ID NO: 5160 - RNA, 23 nt, Artificial Sequence
  siRNA antisense strand against b2GPI
uuuacaacuuggcauggcagacc

SEQ ID NO: 5161 - RNA, 23 nt, Artificial Sequence
  siRNA antisense strand against b2GPI
cuuuacaacuuggcauggcagac

SEQ ID NO: 5162 - RNA, 23 nt, Artificial Sequence
  siRNA antisense strand against b2GPI
ugcuuuacaacuuggcauggcag

SEQ ID NO: 5163 - RNA, 23 nt, Artificial Sequence
  siRNA antisense strand against b2GPI
augcuuuacaacuuggcauggca

SEQ ID NO: 5164 - RNA, 23 nt, Artificial Sequence
  siRNA antisense strand against b2GPI
gaugcuuuacaacuuggcauggc

SEQ ID NO: 5165 - RNA, 23 nt, Artificial Sequence
  siRNA antisense strand against b2GPI
agaugcuuuacaacuuggcaugg

SEQ ID NO: 5166 - RNA, 23 nt, Artificial Sequence
  siRNA antisense strand against b2GPI
aagaugcuuuacaacuuggcaug

SEQ ID NO: 5167 - RNA, 23 nt, Artificial Sequence
  siRNA antisense strand against b2GPI
caagaugcuuuacaacuuggcau

SEQ ID NO: 5168 - RNA, 23 nt, Artificial Sequence
  siRNA antisense strand against b2GPI
acaagaugcuuuacaacuuggca

SEQ ID NO: 5169 - RNA, 23 nt, Artificial Sequence
  siRNA antisense strand against b2GPI
uacaagaugcuuuacaacuuggc

SEQ ID NO: 5170 - RNA, 23 nt, Artificial Sequence
  siRNA antisense strand against b2GPI
uuacaagaugcuuuacaacuugg

SEQ ID NO: 5171 - RNA, 23 nt, Artificial Sequence
  siRNA antisense strand against b2GPI
uuuacaagaugcuuuacaacuug

SEQ ID NO: 5172 - RNA, 23 nt, Artificial Sequence
  siRNA antisense strand against b2GPI
cuuuacaagaugcuuuacaacuu

SEQ ID NO: 5173 - RNA, 23 nt, Artificial Sequence
  siRNA antisense strand against b2GPI
uacuuuacaagaugcuuuacaac

SEQ ID NO: 5174 - RNA, 23 nt, Artificial Sequence
  siRNA antisense strand against b2GPI
guacuuuacaagaugcuuuacaa

SEQ ID NO: 5175 - RNA, 23 nt, Artificial Sequence
  siRNA antisense strand against b2GPI
agguacuuuacaagaugcuuuac

SEQ ID NO: 5176 - RNA, 23 nt, Artificial Sequence
  siRNA antisense strand against b2GPI
acagguacuuuacaagaugcuuu

SEQ ID NO: 5177 - RNA, 23 nt, Artificial Sequence
  siRNA antisense strand against b2GPI
uucacagguacuuuacaagaugc

SEQ ID NO: 5178 - RNA, 23 nt, Artificial Sequence
  siRNA antisense strand against b2GPI
uuucacagguacuuuacaagaug

SEQ ID NO: 5179 - RNA, 23 nt, Artificial Sequence
  siRNA antisense strand against b2GPI
uuuucacagguacuuuacaagau

SEQ ID NO: 5180 - RNA, 23 nt, Artificial Sequence
  siRNA antisense strand against b2GPI
ggcuuuuuucacagguacuuuac

SEQ ID NO: 5181 - RNA, 23 nt, Artificial Sequence
  siRNA antisense strand against b2GPI
uggcuuuuuucacagguacuuua

SEQ ID NO: 5182 - RNA, 23 nt, Artificial Sequence
  siRNA antisense strand against b2GPI
guggcuuuuuucacagguacuuu

SEQ ID NO: 5183 - RNA, 23 nt, Artificial Sequence
  siRNA antisense strand against b2GPI
aguggcuuuuuucacagguacuu

SEQ ID NO: 5184 - RNA, 23 nt, Artificial Sequence
  siRNA antisense strand against b2GPI
acaguggcuuuuuucacagguac

SEQ ID NO: 5185 - RNA, 23 nt, Artificial Sequence
  siRNA antisense strand against b2GPI
cacaguggcuuuuuucacaggua

SEQ ID NO: 5186 - RNA, 23 nt, Artificial Sequence
  siRNA antisense strand against b2GPI
ccacaguggcuuuuuucacaggu

SEQ ID NO: 5187 - RNA, 23 nt, Artificial Sequence
  siRNA antisense strand against b2GPI
accacaguggcuuuuuucacagg

SEQ ID NO: 5188 - RNA, 23 nt, Artificial Sequence
  siRNA antisense strand against b2GPI
caccacaguggcuuuuuucacag

SEQ ID NO: 5189 - RNA, 23 nt, Artificial Sequence
  siRNA antisense strand against b2GPI
uacaccacaguggcuuuuuucac

SEQ ID NO: 5190 - RNA, 23 nt, Artificial Sequence
  siRNA antisense strand against b2GPI
guacaccacaguggcuuuuuuca

SEQ ID NO: 5191 - RNA, 23 nt, Artificial Sequence
  siRNA antisense strand against b2GPI
ugguacaccacaguggcuuuuuu

SEQ ID NO: 5192 - RNA, 23 nt, Artificial Sequence
  siRNA antisense strand against b2GPI
uugguacaccacaguggcuuuuu

SEQ ID NO: 5193 - RNA, 23 nt, Artificial Sequence
  siRNA antisense strand against b2GPI
cuugguacaccacaguggcuuuu

SEQ ID NO: 5194 - RNA, 23 nt, Artificial Sequence
  siRNA antisense strand against b2GPI
uccuugguacaccacaguggcuu

SEQ ID NO: 5195 - RNA, 23 nt, Artificial Sequence
  siRNA antisense strand against b2GPI
ucuccuugguacaccacaguggc

SEQ ID NO: 5196 - RNA, 23 nt, Artificial Sequence
  siRNA antisense strand against b2GPI
cucuccuugguacaccacagugg

SEQ ID NO: 5197 - RNA, 23 nt, Artificial Sequence
  siRNA antisense strand against b2GPI
ucucuccuugguacaccacagug

SEQ ID NO: 5198 - RNA, 23 nt, Artificial Sequence
  siRNA antisense strand against b2GPI
cucucuccuugguacaccacagu

SEQ ID NO: 5199 - RNA, 23 nt, Artificial Sequence
  siRNA antisense strand against b2GPI
ucucucuccuugguacaccacag

SEQ ID NO: 5200 - RNA, 23 nt, Artificial Sequence
  siRNA antisense strand against b2GPI
cucucucuccuugguacaccaca

SEQ ID NO: 5201 - RNA, 23 nt, Artificial Sequence
  siRNA antisense strand against b2GPI
uacucucucuccuugguacacca

SEQ ID NO: 5202 - RNA, 23 nt, Artificial Sequence
  siRNA antisense strand against b2GPI
uuacucucucuccuugguacacc

SEQ ID NO: 5203 - RNA, 23 nt, Artificial Sequence
  siRNA antisense strand against b2GPI
uuuacucucucuccuugguacac

SEQ ID NO: 5204 - RNA, 23 nt, Artificial Sequence
  siRNA antisense strand against b2GPI
cuuuacucucucuccuugguaca

SEQ ID NO: 5205 - RNA, 23 nt, Artificial Sequence
  siRNA antisense strand against b2GPI
ucuuuacucucucuccuugguac

SEQ ID NO: 5206 - RNA, 23 nt, Artificial Sequence
  siRNA antisense strand against b2GPI
aucuuuacucucucuccuuggua

SEQ ID NO: 5207 - RNA, 23 nt, Artificial Sequence
  siRNA antisense strand against b2GPI
aaucuuuacucucucuccuuggu

SEQ ID NO: 5208 - RNA, 23 nt, Artificial Sequence
  siRNA antisense strand against b2GPI
gaaucuuuacucucucuccuugg

SEQ ID NO: 5209 - RNA, 23 nt, Artificial Sequence
  siRNA antisense strand against b2GPI
ugaaucuuuacucucucuccuug

SEQ ID NO: 5210 - RNA, 23 nt, Artificial Sequence
  siRNA antisense strand against b2GPI
cugaaucuuuacucucucuccuu

SEQ ID NO: 5211 - RNA, 23 nt, Artificial Sequence
  siRNA antisense strand against b2GPI
uccugaaucuuuacucucucucc

SEQ ID NO: 5212 - RNA, 23 nt, Artificial Sequence
  siRNA antisense strand against b2GPI
uuccugaaucuuuacucucucuc

SEQ ID NO: 5213 - RNA, 23 nt, Artificial Sequence
  siRNA antisense strand against b2GPI
uuuccugaaucuuuacucucucu

SEQ ID NO: 5214 - RNA, 23 nt, Artificial Sequence
  siRNA antisense strand against b2GPI
uuuuccugaaucuuuacucucuc

SEQ ID NO: 5215 - RNA, 23 nt, Artificial Sequence
  siRNA antisense strand against b2GPI
uuuuuccugaaucuuuacucucu

SEQ ID NO: 5216 - RNA, 23 nt, Artificial Sequence
  siRNA antisense strand against b2GPI
auuuuuccugaaucuuuacucuc

SEQ ID NO: 5217 - RNA, 23 nt, Artificial Sequence
  siRNA antisense strand against b2GPI
aauuuuuccugaaucuuuacucu

SEQ ID NO: 5218 - RNA, 23 nt, Artificial Sequence
  siRNA antisense strand against b2GPI
aaauuuuuccugaaucuuuacuc

SEQ ID NO: 5219 - RNA, 23 nt, Artificial Sequence
  siRNA antisense strand against b2GPI
uaaauuuuuccugaaucuuuacu

SEQ ID NO: 5220 - RNA, 23 nt, Artificial Sequence
  siRNA antisense strand against b2GPI
uuaaauuuuuccugaaucuuuac

SEQ ID NO: 5221 - RNA, 23 nt, Artificial Sequence
  siRNA antisense strand against b2GPI
ccauucuuaaauuuuuccugaau

SEQ ID NO: 5222 - RNA, 23 nt, Artificial Sequence
  siRNA antisense strand against b2GPI
uccauucuuaaauuuuuccugaa

SEQ ID NO: 5223 - RNA, 23 nt, Artificial Sequence
  siRNA antisense strand against b2GPI
uuccauucuuaaauuuuuccuga

SEQ ID NO: 5224 - RNA, 23 nt, Artificial Sequence
  siRNA antisense strand against b2GPI
uagcauuccauucuuaaauuuuu

SEQ ID NO: 5225 - RNA, 23 nt, Artificial Sequence
  siRNA antisense strand against b2GPI
uguagcauuccauucuuaaauuu

SEQ ID NO: 5226 - RNA, 23 nt, Artificial Sequence
  siRNA antisense strand against b2GPI
ccauguagcauuccauucuuaaa

SEQ ID NO: 5227 - RNA, 23 nt, Artificial Sequence
  siRNA antisense strand against b2GPI
accauguagcauuccauucuuaa

SEQ ID NO: 5228 - RNA, 23 nt, Artificial Sequence
  siRNA antisense strand against b2GPI
caccauguagcauuccauucuua

SEQ ID NO: 5229 - RNA, 23 nt, Artificial Sequence
  siRNA antisense strand against b2GPI
ucaccauguagcauuccauucuu

SEQ ID NO: 5230 - RNA, 23 nt, Artificial Sequence
  siRNA antisense strand against b2GPI
aucaccauguagcauuccauucu

SEQ ID NO: 5231 - RNA, 23 nt, Artificial Sequence
  siRNA antisense strand against b2GPI
uaucaccauguagcauuccauuc

SEQ ID NO: 5232 - RNA, 23 nt, Artificial Sequence
  siRNA antisense strand against b2GPI
uuaucaccauguagcauuccauu

SEQ ID NO: 5233 - RNA, 23 nt, Artificial Sequence
  siRNA antisense strand against b2GPI
uuuaucaccauguagcauuccau

SEQ ID NO: 5234 - RNA, 23 nt, Artificial Sequence
  siRNA antisense strand against b2GPI
acuuuaucaccauguagcauucc

SEQ ID NO: 5235 - RNA, 23 nt, Artificial Sequence
  siRNA antisense strand against b2GPI
aacuuuaucaccauguagcauuc

SEQ ID NO: 5236 - RNA, 23 nt, Artificial Sequence
  siRNA antisense strand against b2GPI
aaacuuuaucaccauguagcauu

SEQ ID NO: 5237 - RNA, 23 nt, Artificial Sequence
  siRNA antisense strand against b2GPI
agaaacuuuaucaccauguagca

SEQ ID NO: 5238 - RNA, 23 nt, Artificial Sequence
  siRNA antisense strand against b2GPI
aaagaaacuuuaucaccauguag

SEQ ID NO: 5239 - RNA, 23 nt, Artificial Sequence
  siRNA antisense strand against b2GPI
agaaagaaacuuuaucaccaugu

SEQ ID NO: 5240 - RNA, 23 nt, Artificial Sequence
  siRNA antisense strand against b2GPI
aagaaagaaacuuuaucaccaug

SEQ ID NO: 5241 - RNA, 23 nt, Artificial Sequence
  siRNA antisense strand against b2GPI
gaagaaagaaacuuuaucaccau

SEQ ID NO: 5242 - RNA, 23 nt, Artificial Sequence
  siRNA antisense strand against b2GPI
agaagaaagaaacuuuaucacca

SEQ ID NO: 5243 - RNA, 23 nt, Artificial Sequence
  siRNA antisense strand against b2GPI
ugcagaagaaagaaacuuuauca

SEQ ID NO: 5244 - RNA, 23 nt, Artificial Sequence
  siRNA antisense strand against b2GPI
uugcagaagaaagaaacuuuauc

SEQ ID NO: 5245 - RNA, 23 nt, Artificial Sequence
  siRNA antisense strand against b2GPI
uuugcagaagaaagaaacuuuau

SEQ ID NO: 5246 - RNA, 23 nt, Artificial Sequence
  siRNA antisense strand against b2GPI
uuuugcagaagaaagaaacuuua

SEQ ID NO: 5247 - RNA, 23 nt, Artificial Sequence
  siRNA antisense strand against b2GPI
uuuuugcagaagaaagaaacuuu

SEQ ID NO: 5248 - RNA, 23 nt, Artificial Sequence
  siRNA antisense strand against b2GPI
auuuuugcagaagaaagaaacuu

SEQ ID NO: 5249 - RNA, 23 nt, Artificial Sequence
  siRNA antisense strand against b2GPI
uauuuuugcagaagaaagaaacu

SEQ ID NO: 5250 - RNA, 23 nt, Artificial Sequence
  siRNA antisense strand against b2GPI
uuauuuuugcagaagaaagaaac

SEQ ID NO: 5251 - RNA, 23 nt, Artificial Sequence
  siRNA antisense strand against b2GPI
cuuauuuuugcagaagaaagaaa

SEQ ID NO: 5252 - RNA, 23 nt, Artificial Sequence
  siRNA antisense strand against b2GPI
uuuuccuuauuuuugcagaagaa

SEQ ID NO: 5253 - RNA, 23 nt, Artificial Sequence
  siRNA antisense strand against b2GPI
ucuuuuccuuauuuuugcagaag

SEQ ID NO: 5254 - RNA, 23 nt, Artificial Sequence
  siRNA antisense strand against b2GPI
uucuuuuccuuauuuuugcagaa

SEQ ID NO: 5255 - RNA, 23 nt, Artificial Sequence
  siRNA antisense strand against b2GPI
cuucuuuuccuuauuuuugcaga

SEQ ID NO: 5256 - RNA, 23 nt, Artificial Sequence
  siRNA antisense strand against b2GPI
agcuacacuucuuuuccuuauuu

SEQ ID NO: 5257 - RNA, 23 nt, Artificial Sequence
  siRNA antisense strand against b2GPI
uagcuacacuucuuuuccuuauu

SEQ ID NO: 5258 - RNA, 23 nt, Artificial Sequence
  siRNA antisense strand against b2GPI
auagcuacacuucuuuuccuuau

SEQ ID NO: 5259 - RNA, 23 nt, Artificial Sequence
  siRNA antisense strand against b2GPI
uauagcuacacuucuuuuccuua

SEQ ID NO: 5260 - RNA, 23 nt, Artificial Sequence
  siRNA antisense strand against b2GPI
uguauagcuacacuucuuuuccu

SEQ ID NO: 5261 - RNA, 23 nt, Artificial Sequence
  siRNA antisense strand against b2GPI
cucuguauagcuacacuucuuuu

SEQ ID NO: 5262 - RNA, 23 nt, Artificial Sequence
  siRNA antisense strand against b2GPI
uccucuguauagcuacacuucuu

SEQ ID NO: 5263 - RNA, 23 nt, Artificial Sequence
  siRNA antisense strand against b2GPI
auccucuguauagcuacacuucu

SEQ ID NO: 5264 - RNA, 23 nt, Artificial Sequence
  siRNA antisense strand against b2GPI
gcauccucuguauagcuacacuu

SEQ ID NO: 5265 - RNA, 23 nt, Artificial Sequence
  siRNA antisense strand against b2GPI
agcauccucuguauagcuacacu

SEQ ID NO: 5266 - RNA, 23 nt, Artificial Sequence
  siRNA antisense strand against b2GPI
ugagcauccucuguauagcuaca

SEQ ID NO: 5267 - RNA, 23 nt, Artificial Sequence
  siRNA antisense strand against b2GPI
cugagcauccucuguauagcuac

SEQ ID NO: 5268 - RNA, 23 nt, Artificial Sequence
  siRNA antisense strand against b2GPI
uacacugagcauccucuguauag

SEQ ID NO: 5269 - RNA, 23 nt, Artificial Sequence
  siRNA antisense strand against b2GPI
uauacacugagcauccucuguau

SEQ ID NO: 5270 - RNA, 23 nt, Artificial Sequence
  siRNA antisense strand against b2GPI
cuauacacugagcauccucugua

SEQ ID NO: 5271 - RNA, 23 nt, Artificial Sequence
  siRNA antisense strand against b2GPI
ucuauacacugagcauccucugu

SEQ ID NO: 5272 - RNA, 23 nt, Artificial Sequence
  siRNA antisense strand against b2GPI
aucuauacacugagcauccucug

SEQ ID NO: 5273 - RNA, 23 nt, Artificial Sequence
  siRNA antisense strand against b2GPI
caucuauacacugagcauccucu

SEQ ID NO: 5274 - RNA, 23 nt, Artificial Sequence
  siRNA antisense strand against b2GPI
agugccaucuauacacugagcau

SEQ ID NO: 5275 - RNA, 23 nt, Artificial Sequence
  siRNA antisense strand against b2GPI
uagugccaucuauacacugagca

SEQ ID NO: 5276 - RNA, 23 nt, Artificial Sequence
  siRNA antisense strand against b2GPI
auagugccaucuauacacugagc

SEQ ID NO: 5277 - RNA, 23 nt, Artificial Sequence
  siRNA antisense strand against b2GPI
gauagugccaucuauacacugag

SEQ ID NO: 5278 - RNA, 23 nt, Artificial Sequence
  siRNA antisense strand against b2GPI
cgauagugccaucuauacacuga

SEQ ID NO: 5279 - RNA, 23 nt, Artificial Sequence
  siRNA antisense strand against b2GPI
ucgauagugccaucuauacacug

SEQ ID NO: 5280 - RNA, 23 nt, Artificial Sequence
  siRNA antisense strand against b2GPI
uucgauagugccaucuauacacu

SEQ ID NO: 5281 - RNA, 23 nt, Artificial Sequence
  siRNA antisense strand against b2GPI
cuucgauagugccaucuauacac

SEQ ID NO: 5282 - RNA, 23 nt, Artificial Sequence
  siRNA antisense strand against b2GPI
gacuucgauagugccaucuauac

SEQ ID NO: 5283 - RNA, 23 nt, Artificial Sequence
  siRNA antisense strand against b2GPI
gggacuucgauagugccaucuau

SEQ ID NO: 5284 - RNA, 23 nt, Artificial Sequence
  siRNA antisense strand against b2GPI
uggggacuucgauagugccaucu

SEQ ID NO: 5285 - RNA, 23 nt, Artificial Sequence
  siRNA antisense strand against b2GPI
uuggggacuucgauagugccauc

SEQ ID NO: 5286 - RNA, 23 nt, Artificial Sequence
  siRNA antisense strand against b2GPI
uuuggggacuucgauagugccau

SEQ ID NO: 5287 - RNA, 23 nt, Artificial Sequence
  siRNA antisense strand against b2GPI
cauuuggggacuucgauagugcc

SEQ ID NO: 5288 - RNA, 23 nt, Artificial Sequence
  siRNA antisense strand against b2GPI
agcauuuggggacuucgauagug

SEQ ID NO: 5289 - RNA, 23 nt, Artificial Sequence
  siRNA antisense strand against b2GPI
aagcauuuggggacuucgauagu

SEQ ID NO: 5290 - RNA, 23 nt, Artificial Sequence
  siRNA antisense strand against b2GPI
gaagcauuuggggacuucgauag

SEQ ID NO: 5291 - RNA, 23 nt, Artificial Sequence
  siRNA antisense strand against b2GPI
ugaagcauuuggggacuucgaua

SEQ ID NO: 5292 - RNA, 23 nt, Artificial Sequence
  siRNA antisense strand against b2GPI
ccuugaagcauuuggggacuucg

SEQ ID NO: 5293 - RNA, 23 nt, Artificial Sequence
  siRNA antisense strand against b2GPI
uccuugaagcauuuggggacuuc

SEQ ID NO: 5294 - RNA, 23 nt, Artificial Sequence
  siRNA antisense strand against b2GPI
uuccuugaagcauuuggggacuu

SEQ ID NO: 5295 - RNA, 23 nt, Artificial Sequence
  siRNA antisense strand against b2GPI
guuccuugaagcauuuggggacu

SEQ ID NO: 5296 - RNA, 23 nt, Artificial Sequence
  siRNA antisense strand against b2GPI
uguuccuugaagcauuuggggac

SEQ ID NO: 5297 - RNA, 23 nt, Artificial Sequence
  siRNA antisense strand against b2GPI
guguuccuugaagcauuugggga

SEQ ID NO: 5298 - RNA, 23 nt, Artificial Sequence
  siRNA antisense strand against b2GPI
uguguuccuugaagcauuugggg

SEQ ID NO: 5299 - RNA, 23 nt, Artificial Sequence
  siRNA antisense strand against b2GPI
cuguguuccuugaagcauuuggg

SEQ ID NO: 5300 - RNA, 23 nt, Artificial Sequence
  siRNA antisense strand against b2GPI
acuguguuccuugaagcauuugg

SEQ ID NO: 5301 - RNA, 23 nt, Artificial Sequence
  siRNA antisense strand against b2GPI
aacuguguuccuugaagcauuug

SEQ ID NO: 5302 - RNA, 23 nt, Artificial Sequence
  siRNA antisense strand against b2GPI
gaacuguguuccuugaagcauuu

SEQ ID NO: 5303 - RNA, 23 nt, Artificial Sequence
  siRNA antisense strand against b2GPI
agaacuguguuccuugaagcauu

SEQ ID NO: 5304 - RNA, 23 nt, Artificial Sequence
  siRNA antisense strand against b2GPI
agagaacuguguuccuugaagca

SEQ ID NO: 5305 - RNA, 23 nt, Artificial Sequence
  siRNA antisense strand against b2GPI
cagagaacuguguuccuugaagc

SEQ ID NO: 5306 - RNA, 23 nt, Artificial Sequence
  siRNA antisense strand against b2GPI
agccagagaacuguguuccuuga

SEQ ID NO: 5307 - RNA, 23 nt, Artificial Sequence
  siRNA antisense strand against b2GPI
aagccagagaacuguguuccuug

SEQ ID NO: 5308 - RNA, 23 nt, Artificial Sequence
  siRNA antisense strand against b2GPI
aaagccagagaacuguguuccuu

SEQ ID NO: 5309 - RNA, 23 nt, Artificial Sequence
  siRNA antisense strand against b2GPI
aaaagccagagaacuguguuccu

SEQ ID NO: 5310 - RNA, 23 nt, Artificial Sequence
  siRNA antisense strand against b2GPI
aaaaagccagagaacuguguucc

SEQ ID NO: 5311 - RNA, 23 nt, Artificial Sequence
  siRNA antisense strand against b2GPI
caaaaagccagagaacuguguuc

SEQ ID NO: 5312 - RNA, 23 nt, Artificial Sequence
  siRNA antisense strand against b2GPI
ccaaaaagccagagaacuguguu

SEQ ID NO: 5313 - RNA, 23 nt, Artificial Sequence
  siRNA antisense strand against b2GPI
uccaaaaagccagagaacugugu

SEQ ID NO: 5314 - RNA, 23 nt, Artificial Sequence
  siRNA antisense strand against b2GPI
uuccaaaaagccagagaacugug

SEQ ID NO: 5315 - RNA, 23 nt, Artificial Sequence
  siRNA antisense strand against b2GPI
uuuccaaaaagccagagaacugu

SEQ ID NO: 5316 - RNA, 23 nt, Artificial Sequence
  siRNA antisense strand against b2GPI
uuuuccaaaaagccagagaacug

SEQ ID NO: 5317 - RNA, 23 nt, Artificial Sequence
  siRNA antisense strand against b2GPI
caguuuuccaaaaagccagagaa

SEQ ID NO: 5318 - RNA, 23 nt, Artificial Sequence
  siRNA antisense strand against b2GPI
ucaguuuuccaaaaagccagaga

SEQ ID NO: 5319 - RNA, 23 nt, Artificial Sequence
  siRNA antisense strand against b2GPI
aucaguuuuccaaaaagccagag

SEQ ID NO: 5320 - RNA, 23 nt, Artificial Sequence
  siRNA antisense strand against b2GPI
caucaguuuuccaaaaagccaga

SEQ ID NO: 5321 - RNA, 23 nt, Artificial Sequence
  siRNA antisense strand against b2GPI
ugcaucaguuuuccaaaaagcca

SEQ ID NO: 5322 - RNA, 23 nt, Artificial Sequence
  siRNA antisense strand against b2GPI
augcaucaguuuuccaaaaagcc

SEQ ID NO: 5323 - RNA, 23 nt, Artificial Sequence
  siRNA antisense strand against b2GPI
ucggaugcaucaguuuuccaaaa

SEQ ID NO: 5324 - RNA, 23 nt, Artificial Sequence
  siRNA antisense strand against b2GPI
aucggaugcaucaguuuuccaaa

SEQ ID NO: 5325 - RNA, 23 nt, Artificial Sequence
  siRNA antisense strand against b2GPI
caucggaugcaucaguuuuccaa

SEQ ID NO: 5326 - RNA, 23 nt, Artificial Sequence
  siRNA antisense strand against b2GPI
acaucggaugcaucaguuuucca

SEQ ID NO: 5327 - RNA, 23 nt, Artificial Sequence
  siRNA antisense strand against b2GPI
uacaucggaugcaucaguuuucc

SEQ ID NO: 5328 - RNA, 23 nt, Artificial Sequence
  siRNA antisense strand against b2GPI
uuuacaucggaugcaucaguuuu

SEQ ID NO: 5329 - RNA, 23 nt, Artificial Sequence
  siRNA antisense strand against b2GPI
cuuuacaucggaugcaucaguuu

SEQ ID NO: 5330 - RNA, 23 nt, Artificial Sequence
  siRNA antisense strand against b2GPI
auggcuuuacaucggaugcauca

SEQ ID NO: 5331 - RNA, 23 nt, Artificial Sequence
  siRNA antisense strand against b2GPI
cauggcuuuacaucggaugcauc

SEQ ID NO: 5332 - RNA, 23 nt, Artificial Sequence
  siRNA antisense strand against b2GPI
uagcauggcuuuacaucggaugc

SEQ ID NO: 5333 - RNA, 23 nt, Artificial Sequence
  siRNA antisense strand against b2GPI
uuagcauggcuuuacaucggaug

SEQ ID NO: 5334 - RNA, 23 nt, Artificial Sequence
  siRNA antisense strand against b2GPI
cuuagcauggcuuuacaucggau

SEQ ID NO: 5335 - RNA, 23 nt, Artificial Sequence
  siRNA antisense strand against b2GPI
accaccuuagcauggcuuuacau

SEQ ID NO: 5336 - RNA, 23 nt, Artificial Sequence
  siRNA antisense strand against b2GPI
aaccaccuuagcauggcuuuaca

SEQ ID NO: 5337 - RNA, 23 nt, Artificial Sequence
  siRNA antisense strand against b2GPI
aaaccaccuuagcauggcuuuac

SEQ ID NO: 5338 - RNA, 23 nt, Artificial Sequence
  siRNA antisense strand against b2GPI
aaaaccaccuuagcauggcuuua

SEQ ID NO: 5339 - RNA, 23 nt, Artificial Sequence
  siRNA antisense strand against b2GPI
gaaaaccaccuuagcauggcuuu

SEQ ID NO: 5340 - RNA, 23 nt, Artificial Sequence
  siRNA antisense strand against b2GPI
ugaaaaccaccuuagcauggcuu

SEQ ID NO: 5341 - RNA, 23 nt, Artificial Sequence
  siRNA antisense strand against b2GPI
cugaaaaccaccuuagcauggcu

SEQ ID NO: 5342 - RNA, 23 nt, Artificial Sequence
  siRNA antisense strand against b2GPI
ucugaaaaccaccuuagcauggc

SEQ ID NO: 5343 - RNA, 23 nt, Artificial Sequence
  siRNA antisense strand against b2GPI
aaucugaaaaccaccuuagcaug

SEQ ID NO: 5344 - RNA, 23 nt, Artificial Sequence
  siRNA antisense strand against b2GPI
gaaucugaaaaccaccuuagcau

SEQ ID NO: 5345 - RNA, 23 nt, Artificial Sequence
  siRNA antisense strand against b2GPI
uggaaucugaaaaccaccuuagc

SEQ ID NO: 5346 - RNA, 23 nt, Artificial Sequence
  siRNA antisense strand against b2GPI
guggaaucugaaaaccaccuuag

SEQ ID NO: 5347 - RNA, 23 nt, Artificial Sequence
  siRNA antisense strand against b2GPI
uguggaaucugaaaaccaccuua

SEQ ID NO: 5348 - RNA, 23 nt, Artificial Sequence
  siRNA antisense strand against b2GPI
uguguggaaucugaaaaccaccu

SEQ ID NO: 5349 - RNA, 23 nt, Artificial Sequence
  siRNA antisense strand against b2GPI
uuguguggaaucugaaaaccacc

SEQ ID NO: 5350 - RNA, 23 nt, Artificial Sequence
  siRNA antisense strand against b2GPI
uuuguguggaaucugaaaaccac

SEQ ID NO: 5351 - RNA, 23 nt, Artificial Sequence
  siRNA antisense strand against b2GPI
uuuuguguggaaucugaaaacca

SEQ ID NO: 5352 - RNA, 23 nt, Artificial Sequence
  siRNA antisense strand against b2GPI
auuuuguguggaaucugaaaacc

SEQ ID NO: 5353 - RNA, 23 nt, Artificial Sequence
  siRNA antisense strand against b2GPI
cauuuuguguggaaucugaaaac

SEQ ID NO: 5354 - RNA, 23 nt, Artificial Sequence
  siRNA antisense strand against b2GPI
acauuuuguguggaaucugaaaa

SEQ ID NO: 5355 - RNA, 23 nt, Artificial Sequence
  siRNA antisense strand against b2GPI
gacauuuuguguggaaucugaaa

SEQ ID NO: 5356 - RNA, 23 nt, Artificial Sequence
  siRNA antisense strand against b2GPI
ugacauuuuguguggaaucugaa

SEQ ID NO: 5357 - RNA, 23 nt, Artificial Sequence
  siRNA antisense strand against b2GPI
ugugacauuuuguguggaaucug

SEQ ID NO: 5358 - RNA, 23 nt, Artificial Sequence
  siRNA antisense strand against b2GPI
agugugacauuuuguguggaauc

SEQ ID NO: 5359 - RNA, 23 nt, Artificial Sequence
  siRNA antisense strand against b2GPI
aagugugacauuuuguguggaau

SEQ ID NO: 5360 - RNA, 23 nt, Artificial Sequence
  siRNA antisense strand against b2GPI
caagugugacauuuuguguggaa

SEQ ID NO: 5361 - RNA, 23 nt, Artificial Sequence
  siRNA antisense strand against b2GPI
acaagugugacauuuugugugga

SEQ ID NO: 5362 - RNA, 23 nt, Artificial Sequence
  siRNA antisense strand against b2GPI
aacaagugugacauuuugugugg

SEQ ID NO: 5363 - RNA, 23 nt, Artificial Sequence
  siRNA antisense strand against b2GPI
aaacaagugugacauuuugugug

SEQ ID NO: 5364 - RNA, 23 nt, Artificial Sequence
  siRNA antisense strand against b2GPI
agaaacaagugugacauuuugug

SEQ ID NO: 5365 - RNA, 23 nt, Artificial Sequence
  siRNA antisense strand against b2GPI
caagaaacaagugugacauuuug

SEQ ID NO: 5366 - RNA, 23 nt, Artificial Sequence
  siRNA antisense strand against b2GPI
acaagaaacaagugugacauuuu

SEQ ID NO: 5367 - RNA, 23 nt, Artificial Sequence
  siRNA antisense strand against b2GPI
aacaagaaacaagugugacauuu

SEQ ID NO: 5368 - RNA, 23 nt, Artificial Sequence
  siRNA antisense strand against b2GPI
ugaacaagaaacaagugugacau

SEQ ID NO: 5369 - RNA, 23 nt, Artificial Sequence
  siRNA antisense strand against b2GPI
augaacaagaaacaagugugaca

SEQ ID NO: 5370 - RNA, 23 nt, Artificial Sequence
  siRNA antisense strand against b2GPI
ggaugaacaagaaacaaguguga

SEQ ID NO: 5371 - RNA, 23 nt, Artificial Sequence
  siRNA antisense strand against b2GPI
uggaugaacaagaaacaagugug

SEQ ID NO: 5372 - RNA, 23 nt, Artificial Sequence
  siRNA antisense strand against b2GPI
uuggaugaacaagaaacaagugu

SEQ ID NO: 5373 - RNA, 23 nt, Artificial Sequence
  siRNA antisense strand against b2GPI
cuuggaugaacaagaaacaagug

SEQ ID NO: 5374 - RNA, 23 nt, Artificial Sequence
  siRNA antisense strand against b2GPI
ccuuggaugaacaagaaacaagu

SEQ ID NO: 5375 - RNA, 23 nt, Artificial Sequence
  siRNA antisense strand against b2GPI
uuccuuggaugaacaagaaacaa

SEQ ID NO: 5376 - RNA, 23 nt, Artificial Sequence
  siRNA antisense strand against b2GPI
guuccuuggaugaacaagaaaca

SEQ ID NO: 5377 - RNA, 23 nt, Artificial Sequence
  siRNA antisense strand against b2GPI
gguuccuuggaugaacaagaaac

SEQ ID NO: 5378 - RNA, 23 nt, Artificial Sequence
  siRNA antisense strand against b2GPI
agguuccuuggaugaacaagaaa

SEQ ID NO: 5379 - RNA, 23 nt, Artificial Sequence
  siRNA antisense strand against b2GPI
uagguuccuuggaugaacaagaa

SEQ ID NO: 5380 - RNA, 23 nt, Artificial Sequence
  siRNA antisense strand against b2GPI
uuagguuccuuggaugaacaaga

SEQ ID NO: 5381 - RNA, 23 nt, Artificial Sequence
  siRNA antisense strand against b2GPI
auuagguuccuuggaugaacaag

SEQ ID NO: 5382 - RNA, 23 nt, Artificial Sequence
  siRNA antisense strand against b2GPI
aauuagguuccuuggaugaacaa

SEQ ID NO: 5383 - RNA, 23 nt, Artificial Sequence
  siRNA antisense strand against b2GPI
caauuagguuccuuggaugaaca

SEQ ID NO: 5384 - RNA, 23 nt, Artificial Sequence
  siRNA antisense strand against b2GPI
ucaauuagguuccuuggaugaac

SEQ ID NO: 5385 - RNA, 23 nt, Artificial Sequence
  siRNA antisense strand against b2GPI
uucaauuagguuccuuggaugaa

SEQ ID NO: 5386 - RNA, 23 nt, Artificial Sequence
  siRNA antisense strand against b2GPI
uuucaauuagguuccuuggauga

SEQ ID NO: 5387 - RNA, 23 nt, Artificial Sequence
  siRNA antisense strand against b2GPI
auuucaauuagguuccuuggaug

SEQ ID NO: 5388 - RNA, 23 nt, Artificial Sequence
  siRNA antisense strand against b2GPI
aauuucaauuagguuccuuggau

SEQ ID NO: 5389 - RNA, 23 nt, Artificial Sequence
  siRNA antisense strand against b2GPI
aaauuucaauuagguuccuugga

SEQ ID NO: 5390 - RNA, 23 nt, Artificial Sequence
  siRNA antisense strand against b2GPI
uaaauuucaauuagguuccuugg

SEQ ID NO: 5391 - RNA, 23 nt, Artificial Sequence
  siRNA antisense strand against b2GPI
uuaaauuucaauuagguuccuug

SEQ ID NO: 5392 - RNA, 23 nt, Artificial Sequence
  siRNA antisense strand against b2GPI
uuuaaauuucaauuagguuccuu

SEQ ID NO: 5393 - RNA, 23 nt, Artificial Sequence
  siRNA antisense strand against b2GPI
uuuuaaauuucaauuagguuccu

SEQ ID NO: 5394 - RNA, 23 nt, Artificial Sequence
  siRNA antisense strand against b2GPI
uuauuuuuaaauuucaauuaggu

SEQ ID NO: 5395 - RNA, 23 nt, Artificial Sequence
  siRNA antisense strand against b2GPI
aauucaguagcuuuauuuuuaaa

SEQ ID NO: 5396 - RNA, 23 nt, Artificial Sequence
  siRNA antisense strand against b2GPI
aaauucaguagcuuuauuuuuaa

SEQ ID NO: 5397 - RNA, 23 nt, Artificial Sequence
  siRNA antisense strand against b2GPI
uaaauucaguagcuuuauuuuua

SEQ ID NO: 5398 - RNA, 23 nt, Artificial Sequence
  siRNA antisense strand against b2GPI
aauaaauucaguagcuuuauuuu

SEQ ID NO: 5399 - RNA, 23 nt, Artificial Sequence
  siRNA antisense strand against b2GPI
cggcaauaaauucaguagcuuua

SEQ ID NO: 5400 - RNA, 23 nt, Artificial Sequence
  siRNA antisense strand against b2GPI
gcggcaauaaauucaguagcuuu

SEQ ID NO: 5401 - RNA, 23 nt, Artificial Sequence
  siRNA antisense strand against b2GPI
ugcggcaauaaauucaguagcuu

SEQ ID NO: 5402 - RNA, 23 nt, Artificial Sequence
  siRNA antisense strand against b2GPI
gugcggcaauaaauucaguagcu

SEQ ID NO: 5403 - RNA, 23 nt, Artificial Sequence
  siRNA antisense strand against b2GPI
ugcaauagcaacauggcagagga

SEQ ID NO: 5404 - RNA, 23 nt, Artificial Sequence
  siRNA antisense strand against b2GPI
uccauuuucuaagauuccagcga

SEQ ID NO: 5405 - RNA, 21 nt, Artificial Sequence
  siRNA sense strand against b2GPI
  modified_base (1)..(1): 2'-deoxy-2'-fluorouridine
  modified_base (2)..(2): gm
  misc_feature (2)..(3): 5'-phosphonothioate
  modified_base (3)..(3): 2'-deoxy-2'-fluoroguanosine
  modified_base (4)..(4): um
  modified_base (5)..(5): 2'-deoxy-2'-fluoroadenosine
  modified_base (6)..(6): gm
  modified_base (7)..(7): 2'-deoxy-2'-fluorouridine
  modified_base (8)..(8): gm
  modified_base (9)..(9): 2'-deoxy-2'-fluorocytidine
  modified_base (10)..(10): cm
  modified_base (11)..(11): 2'-deoxy-2'-fluoroadenosine
  modified_base (12)..(12): 2'-deoxy-2'-fluoroguanosine
  modified_base (13)..(13): um
  modified_base (14)..(14): 2'-deoxy-2'-fluoroguanosine
  modified_base (15)..(15): um
  modified_base (16)..(16): 2'-deoxy-2'-fluoroguanosine
  modified_base (17)..(17): 2'-O-methyladenosine
  modified_base (18)..(18): 2'-deoxy-2'-fluorocytidine
  modified_base (19)..(19): um
  modified_base (20)..(20): 2'-deoxy-2'-fluorocytidine
  modified_base (21)..(21): 2'-O-methyladenosine
ugguagugccagugugacuca

SEQ ID NO: 5406 - RNA, 21 nt, Artificial Sequence
  siRNA sense strand against b2GPI
  modified_base (1)..(1): 2'-deoxy-2'-fluoroguanosine
  modified_base (2)..(2): gm
  misc_feature (2)..(3): 5'-phosphonothioate
  modified_base (3)..(3): 2'-deoxy-2'-fluorouridine
  modified_base (4)..(4): 2'-O-methyladenosine
  modified_base (5)..(5): 2'-deoxy-2'-fluoroguanosine
  modified_base (6)..(6): um
  modified_base (7)..(7): 2'-deoxy-2'-fluoroguanosine
  modified_base (8)..(8): cm
  modified_base (9)..(9): 2'-deoxy-2'-fluorocytidine
  modified_base (10)..(10): 2'-O-methyladenosine
  modified_base (11)..(11): 2'-deoxy-2'-fluoroguanosine
  modified_base (12)..(12): 2'-deoxy-2'-fluorouridine
  modified_base (13)..(13): gm
  modified_base (14)..(14): 2'-deoxy-2'-fluorouridine
  modified_base (15)..(15): gm
  modified_base (16)..(16): 2'-deoxy-2'-fluoroadenosine
  modified_base (17)..(17): cm
  modified_base (18)..(18): 2'-deoxy-2'-fluorouridine
  modified_base (19)..(19): cm
  modified_base (20)..(20): 2'-deoxy-2'-fluoroadenosine
  modified_base (21)..(21): um
gguagugccagugugacucau

SEQ ID NO: 5407 - RNA, 21 nt, Artificial Sequence
  siRNA sense strand against b2GPI
  modified_base (1)..(1): 2'-deoxy-2'-fluoroguanosine
  modified_base (2)..(2): um
  misc_feature (2)..(3): 5'-phosphonothioate
  modified_base (3)..(3): 2'-deoxy-2'-fluoroadenosine
  modified_base (4)..(4): gm
  modified_base (5)..(5): 2'-deoxy-2'-fluorouridine
  modified_base (6)..(6): gm
  modified_base (7)..(7): 2'-deoxy-2'-fluorocytidine
  modified_base (8)..(8): cm
  modified_base (9)..(9): 2'-deoxy-2'-fluoroadenosine
  modified_base (10)..(10): gm
  modified_base (11)..(11): 2'-deoxy-2'-fluorouridine
  modified_base (12)..(12): 2'-deoxy-2'-fluoroguanosine
  modified_base (13)..(13): um
  modified_base (14)..(14): 2'-deoxy-2'-fluoroguanosine
  modified_base (15)..(15): 2'-O-methyladenosine
  modified_base (16)..(16): 2'-deoxy-2'-fluorocytidine
  modified_base (17)..(17): um
  modified_base (18)..(18): 2'-deoxy-2'-fluorocytidine
  modified_base (19)..(19): 2'-O-methyladenosine
  modified_base (20)..(20): 2'-deoxy-2'-fluorouridine
  modified_base (21)..(21): cm
guagugccagugugacucauc

SEQ ID NO: 5408 - RNA, 21 nt, Artificial Sequence
  siRNA sense strand against b2GPI
  modified_base (1)..(1): 2'-deoxy-2'-fluorouridine
  modified_base (2)..(2): 2'-O-methyladenosine
  misc_feature (2)..(3): 5'-phosphonothioate
  modified_base (3)..(3): 2'-deoxy-2'-fluoroguanosine
  modified_base (4)..(4): um
  modified_base (5)..(5): 2'-deoxy-2'-fluoroguanosine
  modified_base (6)..(6): cm
  modified_base (7)..(7): 2'-deoxy-2'-fluorocytidine
  modified_base (8)..(8): 2'-O-methyladenosine
  modified_base (9)..(9): 2'-deoxy-2'-fluoroguanosine
  modified_base (10)..(10): um
  modified_base (11)..(11): 2'-deoxy-2'-fluoroguanosine
  modified_base (12)..(12): 2'-deoxy-2'-fluorouridine
  modified_base (13)..(13): gm
  modified_base (14)..(14): 2'-deoxy-2'-fluoroadenosine
  modified_base (15)..(15): cm
  modified_base (16)..(16): 2'-deoxy-2'-fluorouridine
  modified_base (17)..(17): cm
  modified_base (18)..(18): 2'-deoxy-2'-fluoroadenosine
  modified_base (19)..(19): um
  modified_base (20)..(20): 2'-deoxy-2'-fluorocytidine
  modified_base (21)..(21): cm
uagugccagugugacucaucc

SEQ ID NO: 5409 - RNA, 21 nt, Artificial Sequence
  siRNA sense strand against b2GPI
  modified_base (1)..(1): 2'-deoxy-2'-fluoroadenosine
  modified_base (2)..(2): gm
  misc_feature (2)..(3): 5'-phosphonothioate
  modified_base (3)..(3): 2'-deoxy-2'-fluorouridine
  modified_base (4)..(4): gm
  modified_base (5)..(5): 2'-deoxy-2'-fluorocytidine
  modified_base (6)..(6): cm
  modified_base (7)..(7): 2'-deoxy-2'-fluoroadenosine
  modified_base (8)..(8): gm
  modified_base (9)..(9): 2'-deoxy-2'-fluorouridine
  modified_base (10)..(10): gm
  modified_base (11)..(11): 2'-deoxy-2'-fluorouridine
  modified_base (12)..(12): 2'-deoxy-2'-fluoroguanosine
  modified_base (13)..(13): 2'-O-methyladenosine
  modified_base (14)..(14): 2'-deoxy-2'-fluorocytidine
  modified_base (15)..(15): um
  modified_base (16)..(16): 2'-deoxy-2'-fluorocytidine
  modified_base (17)..(17): 2'-O-methyladenosine
  modified_base (18)..(18): 2'-deoxy-2'-fluorouridine
  modified_base (19)..(19): cm
  modified_base (20)..(20): 2'-deoxy-2'-fluorocytidine
  modified_base (21)..(21): 2'-O-methyladenosine
agugccagugugacucaucca

SEQ ID NO: 5410 - RNA, 21 nt, Artificial Sequence
  siRNA sense strand against b2GPI
  modified_base (1)..(1): 2'-deoxy-2'-fluoroguanosine
  modified_base (2)..(2): um
  misc_feature (2)..(3): 5'-phosphonothioate
  modified_base (3)..(3): 2'-deoxy-2'-fluoroguanosine
  modified_base (4)..(4): cm
  modified_base (5)..(5): 2'-deoxy-2'-fluorocytidine
  modified_base (6)..(6): 2'-O-methyladenosine
  modified_base (7)..(7): 2'-deoxy-2'-fluoroguanosine
  modified_base (8)..(8): um
  modified_base (9)..(9): 2'-deoxy-2'-fluoroguanosine
  modified_base (10)..(10): um
  modified_base (11)..(11): 2'-deoxy-2'-fluoroguanosine
  modified_base (12)..(12): 2'-deoxy-2'-fluoroadenosine
  modified_base (13)..(13): cm
  modified_base (14)..(14): 2'-deoxy-2'-fluorouridine
  modified_base (15)..(15): cm
  modified_base (16)..(16): 2'-deoxy-2'-fluoroadenosine
  modified_base (17)..(17): um
  modified_base (18)..(18): 2'-deoxy-2'-fluorocytidine
  modified_base (19)..(19): cm
  modified_base (20)..(20): 2'-deoxy-2'-fluoroadenosine
  modified_base (21)..(21): cm
gugccagugugacucauccac

SEQ ID NO: 5411 - RNA, 21 nt, Artificial Sequence
  siRNA sense strand against b2GPI
  modified_base (1)..(1): 2'-deoxy-2'-fluorouridine
  modified_base (2)..(2): gm
  misc_feature (2)..(3): 5'-phosphonothioate
  modified_base (3)..(3): 2'-deoxy-2'-fluorocytidine
  modified_base (4)..(4): cm
  modified_base (5)..(5): 2'-deoxy-2'-fluoroadenosine
  modified_base (6)..(6): gm
  modified_base (7)..(7): 2'-deoxy-2'-fluorouridine
  modified_base (8)..(8): gm
  modified_base (9)..(9): 2'-deoxy-2'-fluorouridine
  modified_base (10)..(10): gm
  modified_base (11)..(11): 2'-deoxy-2'-fluoroadenosine
  modified_base (12)..(12): 2'-deoxy-2'-fluorocytidine
  modified_base (13)..(13): um
  modified_base (14)..(14): 2'-deoxy-2'-fluorocytidine
  modified_base (15)..(15): 2'-O-methyladenosine
  modified_base (16)..(16): 2'-deoxy-2'-fluorouridine
  modified_base (17)..(17): cm
  modified_base (18)..(18): 2'-deoxy-2'-fluorocytidine
  modified_base (19)..(19): 2'-O-methyladenosine
  modified_base (20)..(20): 2'-deoxy-2'-fluorocytidine
  modified_base (21)..(21): 2'-O-methyladenosine
ugccagugugacucauccaca

SEQ ID NO: 5412 - RNA, 21 nt, Artificial Sequence
  siRNA sense strand against b2GPI
  modified_base (1)..(1): 2'-deoxy-2'-fluoroguanosine
  modified_base (2)..(2): cm
  misc_feature (2)..(3): 5'-phosphonothioate
  modified_base (3)..(3): 2'-deoxy-2'-fluorocytidine
  modified_base (4)..(4): 2'-O-methyladenosine
  modified_base (5)..(5): 2'-deoxy-2'-fluoroguanosine
  modified_base (6)..(6): um
  modified_base (7)..(7): 2'-deoxy-2'-fluoroguanosine
  modified_base (8)..(8): um
  modified_base (9)..(9): 2'-deoxy-2'-fluoroguanosine
  modified_base (10)..(10): 2'-O-methyladenosine
  modified_base (11)..(11): 2'-deoxy-2'-fluorocytidine
  modified_base (12)..(12): 2'-deoxy-2'-fluorouridine
  modified_base (13)..(13): cm
  modified_base (14)..(14): 2'-deoxy-2'-fluoroadenosine
  modified_base (15)..(15): um
  modified_base (16)..(16): 2'-deoxy-2'-fluorocytidine
  modified_base (17)..(17): cm
  modified_base (18)..(18): 2'-deoxy-2'-fluoroadenosine
  modified_base (19)..(19): cm
  modified_base (20)..(20): 2'-deoxy-2'-fluoroadenosine
  modified_base (21)..(21): 2'-O-methyladenosine
gccagugugacucauccacaa

SEQ ID NO: 5413 - RNA, 21 nt, Artificial Sequence
  siRNA sense strand against b2GPI
  modified_base (1)..(1): 2'-deoxy-2'-fluorocytidine
  modified_base (2)..(2): cm
  misc_feature (2)..(3): 5'-phosphonothioate
  modified_base (3)..(3): 2'-deoxy-2'-fluoroadenosine
  modified_base (4)..(4): gm
  modified_base (5)..(5): 2'-deoxy-2'-fluorouridine
  modified_base (6)..(6): gm
  modified_base (7)..(7): 2'-deoxy-2'-fluorouridine
  modified_base (8)..(8): gm
  modified_base (9)..(9): 2'-deoxy-2'-fluoroadenosine
  modified_base (10)..(10): cm
  modified_base (11)..(11): 2'-deoxy-2'-fluorouridine
  modified_base (12)..(12): 2'-deoxy-2'-fluorocytidine
  modified_base (13)..(13): 2'-O-methyladenosine
  modified_base (14)..(14): 2'-deoxy-2'-fluorouridine
  modified_base (15)..(15): cm
  modified_base (16)..(16): 2'-deoxy-2'-fluorocytidine
  modified_base (17)..(17): 2'-O-methyladenosine
  modified_base (18)..(18): 2'-deoxy-2'-fluorocytidine
  modified_base (19)..(19): 2'-O-methyladenosine
  modified_base (20)..(20): 2'-deoxy-2'-fluoroadenosine
  modified_base (21)..(21): um
ccagugugacucauccacaau

SEQ ID NO: 5414 - RNA, 21 nt, Artificial Sequence
  siRNA sense strand against b2GPI
  modified_base (1)..(1): 2'-deoxy-2'-fluorocytidine
  modified_base (2)..(2): 2'-O-methyladenosine
  misc_feature (2)..(3): 5'-phosphonothioate
  modified_base (3)..(3): 2'-deoxy-2'-fluoroguanosine
  modified_base (4)..(4): um
  modified_base (5)..(5): 2'-deoxy-2'-fluoroguanosine
  modified_base (6)..(6): um
  modified_base (7)..(7): 2'-deoxy-2'-fluoroguanosine
  modified_base (8)..(8): 2'-O-methyladenosine
  modified_base (9)..(9): 2'-deoxy-2'-fluorocytidine
  modified_base (10)..(10): um
  modified_base (11)..(11): 2'-deoxy-2'-fluorocytidine
  modified_base (12)..(12): 2'-deoxy-2'-fluoroadenosine
  modified_base (13)..(13): um
  modified_base (14)..(14): 2'-deoxy-2'-fluorocytidine
  modified_base (15)..(15): cm
  modified_base (16)..(16): 2'-deoxy-2'-fluoroadenosine
  modified_base (17)..(17): cm
  modified_base (18)..(18): 2'-deoxy-2'-fluoroadenosine
  modified_base (19)..(19): 2'-O-methyladenosine
  modified_base (20)..(20): 2'-deoxy-2'-fluorouridine
  modified_base (21)..(21): gm
cagugugacucauccacaaug

SEQ ID NO: 5415 - RNA, 21 nt, Artificial Sequence
  siRNA sense strand against b2GPI
  modified_base (1)..(1): 2'-deoxy-2'-fluoroadenosine
  modified_base (2)..(2): gm
  misc_feature (2)..(3): 5'-phosphonothioate
  modified_base (3)..(3): 2'-deoxy-2'-fluorouridine
  modified_base (4)..(4): gm
  modified_base (5)..(5): 2'-deoxy-2'-fluorouridine
  modified_base (6)..(6): gm
  modified_base (7)..(7): 2'-deoxy-2'-fluoroadenosine
  modified_base (8)..(8): cm
  modified_base (9)..(9): 2'-deoxy-2'-fluorouridine
  modified_base (10)..(10): cm
  modified_base (11)..(11): 2'-deoxy-2'-fluoroadenosine
  modified_base (12)..(12): 2'-deoxy-2'-fluorouridine
  modified_base (13)..(13): cm
  modified_base (14)..(14): 2'-deoxy-2'-fluorocytidine
  modified_base (15)..(15): 2'-O-methyladenosine
  modified_base (16)..(16): 2'-deoxy-2'-fluorocytidine
  modified_base (17)..(17): 2'-O-methyladenosine
  modified_base (18)..(18): 2'-deoxy-2'-fluoroadenosine
  modified_base (19)..(19): um
  modified_base (20)..(20): 2'-deoxy-2'-fluoroguanosine
  modified_base (21)..(21): 2'-O-methyladenosine
agugugacucauccacaauga

SEQ ID NO: 5416 - RNA, 21 nt, Artificial Sequence
  siRNA sense strand against b2GPI
  modified_base (1)..(1): 2'-deoxy-2'-fluoroguanosine
  modified_base (2)..(2): um
  misc_feature (2)..(3): 5'-phosphonothioate
  modified_base (3)..(3): 2'-deoxy-2'-fluoroguanosine
  modified_base (4)..(4): um
  modified_base (5)..(5): 2'-deoxy-2'-fluoroguanosine
  modified_base (6)..(6): 2'-O-methyladenosine
  modified_base (7)..(7): 2'-deoxy-2'-fluorocytidine
  modified_base (8)..(8): um
  modified_base (9)..(9): 2'-deoxy-2'-fluorocytidine
  modified_base (10)..(10): 2'-O-methyladenosine
  modified_base (11)..(11): 2'-deoxy-2'-fluorouridine
  modified_base (12)..(12): 2'-deoxy-2'-fluorocytidine
  modified_base (13)..(13): cm
  modified_base (14)..(14): 2'-deoxy-2'-fluoroadenosine
  modified_base (15)..(15): cm
  modified_base (16)..(16): 2'-deoxy-2'-fluoroadenosine
  modified_base (17)..(17): 2'-O-methyladenosine
  modified_base (18)..(18): 2'-deoxy-2'-fluorouridine
  modified_base (19)..(19): gm
  modified_base (20)..(20): 2'-deoxy-2'-fluoroadenosine
  modified_base (21)..(21): um
gugugacucauccacaaugau

SEQ ID NO: 5417 - RNA, 21 nt, Artificial Sequence
  siRNA sense strand against b2GPI
  modified_base (1)..(1): 2'-deoxy-2'-fluorouridine
  modified_base (2)..(2): gm
  misc_feature (2)..(3): 5'-phosphonothioate
  modified_base (3)..(3): 2'-deoxy-2'-fluorouridine
  modified_base (4)..(4): gm
  modified_base (5)..(5): 2'-deoxy-2'-fluoroadenosine
  modified_base (6)..(6): cm
  modified_base (7)..(7): 2'-deoxy-2'-fluorouridine
  modified_base (8)..(8): cm
  modified_base (9)..(9): 2'-deoxy-2'-fluoroadenosine
  modified_base (10)..(10): um
  modified_base (11)..(11): 2'-deoxy-2'-fluorocytidine
  modified_base (12)..(12): 2'-deoxy-2'-fluorocytidine
  modified_base (13)..(13): 2'-O-methyladenosine
  modified_base (14)..(14): 2'-deoxy-2'-fluorocytidine
  modified_base (15)..(15): 2'-O-methyladenosine
  modified_base (16)..(16): 2'-deoxy-2'-fluoroadenosine
  modified_base (17)..(17): um
  modified_base (18)..(18): 2'-deoxy-2'-fluoroguanosine
  modified_base (19)..(19): 2'-O-methyladenosine
  modified_base (20)..(20): 2'-deoxy-2'-fluorouridine
  modified_base (21)..(21): um
ugugacucauccacaaugauu

SEQ ID NO: 5418 - RNA, 21 nt, Artificial Sequence
  siRNA sense strand against b2GPI
  modified_base (1)..(1): 2'-deoxy-2'-fluoroguanosine
  modified_base (2)..(2): um
  misc_feature (2)..(3): 5'-phosphonothioate
  modified_base (3)..(3): 2'-deoxy-2'-fluoroguanosine
  modified_base (4)..(4): 2'-O-methyladenosine
  modified_base (5)..(5): 2'-deoxy-2'-fluorocytidine
  modified_base (6)..(6): um
  modified_base (7)..(7): 2'-deoxy-2'-fluorocytidine
  modified_base (8)..(8): 2'-O-methyladenosine
  modified_base (9)..(9): 2'-deoxy-2'-fluorouridine
  modified_base (10)..(10): cm
  modified_base (11)..(11): 2'-deoxy-2'-fluorocytidine
  modified_base (12)..(12): 2'-deoxy-2'-fluoroadenosine
  modified_base (13)..(13): cm
  modified_base (14)..(14): 2'-deoxy-2'-fluoroadenosine
  modified_base (15)..(15): 2'-O-methyladenosine
  modified_base (16)..(16): 2'-deoxy-2'-fluorouridine
  modified_base (17)..(17): gm
  modified_base (18)..(18): 2'-deoxy-2'-fluoroadenosine
  modified_base (19)..(19): um
  modified_base (20)..(20): 2'-deoxy-2'-fluorouridine
  modified_base (21)..(21): um
gugacucauccacaaugauuu

SEQ ID NO: 5419 - RNA, 21 nt, Artificial Sequence
  siRNA sense strand against b2GPI
  modified_base (1)..(1): 2'-deoxy-2'-fluorouridine
  modified_base (2)..(2): gm
  misc_feature (2)..(3): 5'-phosphonothioate
  modified_base (3)..(3): 2'-deoxy-2'-fluoroadenosine
  modified_base (4)..(4): cm
  modified_base (5)..(5): 2'-deoxy-2'-fluorouridine
  modified_base (6)..(6): cm
  modified_base (7)..(7): 2'-deoxy-2'-fluoroadenosine
  modified_base (8)..(8): um
  modified_base (9)..(9): 2'-deoxy-2'-fluorocytidine
  modified_base (10)..(10): cm
  modified_base (11)..(11): 2'-deoxy-2'-fluoroadenosine
  modified_base (12)..(12): 2'-deoxy-2'-fluorocytidine
  modified_base (13)..(13): 2'-O-methyladenosine
  modified_base (14)..(14): 2'-deoxy-2'-fluoroadenosine
  modified_base (15)..(15): um
  modified_base (16)..(16): 2'-deoxy-2'-fluoroguanosine
  modified_base (17)..(17): 2'-O-methyladenosine
  modified_base (18)..(18): 2'-deoxy-2'-fluorouridine
  modified_base (19)..(19): um
  modified_base (20)..(20): 2'-deoxy-2'-fluorouridine
  modified_base (21)..(21): cm
ugacucauccacaaugauuuc

SEQ ID NO: 5420 - RNA, 21 nt, Artificial Sequence
  siRNA sense strand against b2GPI
  modified_base (1)..(1): 2'-deoxy-2'-fluoroguanosine
  modified_base (2)..(2): 2'-O-methyladenosine
  misc_feature (2)..(3): 5'-phosphonothioate
  modified_base (3)..(3): 2'-deoxy-2'-fluorocytidine
  modified_base (4)..(4): um
  modified_base (5)..(5): 2'-deoxy-2'-fluorocytidine
  modified_base (6)..(6): 2'-O-methyladenosine
  modified_base (7)..(7): 2'-deoxy-2'-fluorouridine
  modified_base (8)..(8): cm
  modified_base (9)..(9): 2'-deoxy-2'-fluorocytidine
  modified_base (10)..(10): 2'-O-methyladenosine
  modified_base (11)..(11): 2'-deoxy-2'-fluorocytidine
  modified_base (12)..(12): 2'-deoxy-2'-fluoroadenosine
  modified_base (13)..(13): 2'-O-methyladenosine
  modified_base (14)..(14): 2'-deoxy-2'-fluorouridine
  modified_base (15)..(15): gm
  modified_base (16)..(16): 2'-deoxy-2'-fluoroadenosine
  modified_base (17)..(17): um
  modified_base (18)..(18): 2'-deoxy-2'-fluorouridine
  modified_base (19)..(19): um
  modified_base (20)..(20): 2'-deoxy-2'-fluorocytidine
  modified_base (21)..(21): um
gacucauccacaaugauuucu

SEQ ID NO: 5421 - RNA, 21 nt, Artificial Sequence
  siRNA sense strand against b2GPI
  modified_base (1)..(1): 2'-deoxy-2'-fluorocytidine
  modified_base (2)..(2): um
  misc_feature (2)..(3): 5'-phosphonothioate
  modified_base (3)..(3): 2'-deoxy-2'-fluorocytidine
  modified_base (4)..(4): 2'-O-methyladenosine
  modified_base (5)..(5): 2'-deoxy-2'-fluorouridine
  modified_base (6)..(6): cm
  modified_base (7)..(7): 2'-deoxy-2'-fluorocytidine
  modified_base (8)..(8): 2'-O-methyladenosine
  modified_base (9)..(9): 2'-deoxy-2'-fluorocytidine
  modified_base (10)..(10): 2'-O-methyladenosine
  modified_base (11)..(11): 2'-deoxy-2'-fluoroadenosine
  modified_base (12)..(12): 2'-deoxy-2'-fluorouridine
  modified_base (13)..(13): gm
  modified_base (14)..(14): 2'-deoxy-2'-fluoroadenosine
  modified_base (15)..(15): um
  modified_base (16)..(16): 2'-deoxy-2'-fluorouridine
  modified_base (17)..(17): um
  modified_base (18)..(18): 2'-deoxy-2'-fluorocytidine
  modified_base (19)..(19): um
  modified_base (20)..(20): 2'-deoxy-2'-fluorocytidine
  modified_base (21)..(21): cm
cucauccacaaugauuucucc

SEQ ID NO: 5422 - RNA, 21 nt, Artificial Sequence
  siRNA sense strand against b2GPI
  modified_base (1)..(1): 2'-deoxy-2'-fluorouridine
  modified_base (2)..(2): cm
  misc_feature (2)..(3): 5'-phosphonothioate
  modified_base (3)..(3): 2'-deoxy-2'-fluoroadenosine
  modified_base (4)..(4): um
  modified_base (5)..(5): 2'-deoxy-2'-fluorocytidine
  modified_base (6)..(6): cm
  modified_base (7)..(7): 2'-deoxy-2'-fluoroadenosine
  modified_base (8)..(8): cm
  modified_base (9)..(9): 2'-deoxy-2'-fluoroadenosine
  modified_base (10)..(10): 2'-O-methyladenosine
  modified_base (11)..(11): 2'-deoxy-2'-fluorouridine
  modified_base (12)..(12): 2'-deoxy-2'-fluoroguanosine
  modified_base (13)..(13): 2'-O-methyladenosine
  modified_base (14)..(14): 2'-deoxy-2'-fluorouridine
  modified_base (15)..(15): um
  modified_base (16)..(16): 2'-deoxy-2'-fluorouridine
  modified_base (17)..(17): cm
  modified_base (18)..(18): 2'-deoxy-2'-fluorouridine
  modified_base (19)..(19): cm
  modified_base (20)..(20): 2'-deoxy-2'-fluorocytidine
  modified_base (21)..(21): 2'-O-methyladenosine
ucauccacaaugauuucucca

SEQ ID NO: 5423 - RNA, 21 nt, Artificial Sequence
  siRNA sense strand against b2GPI
  modified_base (1)..(1): 2'-deoxy-2'-fluorocytidine
  modified_base (2)..(2): 2'-O-methyladenosine
  misc_feature (2)..(3): 5'-phosphonothioate
  modified_base (3)..(3): 2'-deoxy-2'-fluorouridine
  modified_base (4)..(4): cm
  modified_base (5)..(5): 2'-deoxy-2'-fluorocytidine
  modified_base (6)..(6): 2'-O-methyladenosine
  modified_base (7)..(7): 2'-deoxy-2'-fluorocytidine
  modified_base (8)..(8): 2'-O-methyladenosine
  modified_base (9)..(9): 2'-deoxy-2'-fluoroadenosine
  modified_base (10)..(10): um
  modified_base (11)..(11): 2'-deoxy-2'-fluoroguanosine
  modified_base (12)..(12): 2'-deoxy-2'-fluoroadenosine
  modified_base (13)..(13): um
  modified_base (14)..(14): 2'-deoxy-2'-fluorouridine
  modified_base (15)..(15): um
  modified_base (16)..(16): 2'-deoxy-2'-fluorocytidine
  modified_base (17)..(17): um
  modified_base (18)..(18): 2'-deoxy-2'-fluorocytidine
  modified_base (19)..(19): cm
  modified_base (20)..(20): 2'-deoxy-2'-fluoroadenosine
  modified_base (21)..(21): gm
cauccacaaugauuucuccag

SEQ ID NO: 5424 - RNA, 21 nt, Artificial Sequence
  siRNA sense strand against b2GPI
  modified_base (1)..(1): 2'-deoxy-2'-fluoroadenosine
  modified_base (2)..(2): um
  misc_feature (2)..(3): 5'-phosphonothioate
  modified_base (3)..(3): 2'-deoxy-2'-fluorocytidine
  modified_base (4)..(4): cm
  modified_base (5)..(5): 2'-deoxy-2'-fluoroadenosine
  modified_base (6)..(6): cm
  modified_base (7)..(7): 2'-deoxy-2'-fluoroadenosine
  modified_base (8)..(8): 2'-O-methyladenosine
  modified_base (9)..(9): 2'-deoxy-2'-fluorouridine
  modified_base (10)..(10): gm
  modified_base (11)..(11): 2'-deoxy-2'-fluoroadenosine
  modified_base (12)..(12): 2'-deoxy-2'-fluorouridine
  modified_base (13)..(13): um
  modified_base (14)..(14): 2'-deoxy-2'-fluorouridine
  modified_base (15)..(15): cm
  modified_base (16)..(16): 2'-deoxy-2'-fluorouridine
  modified_base (17)..(17): cm
  modified_base (18)..(18): 2'-deoxy-2'-fluorocytidine
  modified_base (19)..(19): 2'-O-methyladenosine
  modified_base (20)..(20): 2'-deoxy-2'-fluoroguanosine
  modified_base (21)..(21): um
auccacaaugauuucuccagu

SEQ ID NO: 5425 - RNA, 21 nt, Artificial Sequence
  siRNA sense strand against b2GPI
  modified_base (1)..(1): 2'-deoxy-2'-fluorouridine
  modified_base (2)..(2): cm
  misc_feature (2)..(3): 5'-phosphonothioate
  modified_base (3)..(3): 2'-deoxy-2'-fluorocytidine
  modified_base (4)..(4): 2'-O-methyladenosine
  modified_base (5)..(5): 2'-deoxy-2'-fluorocytidine
  modified_base (6)..(6): 2'-O-methyladenosine
  modified_base (7)..(7): 2'-deoxy-2'-fluoroadenosine
  modified_base (8)..(8): um
  modified_base (9)..(9): 2'-deoxy-2'-fluoroguanosine
  modified_base (10)..(10): 2'-O-methyladenosine
  modified_base (11)..(11): 2'-deoxy-2'-fluorouridine
  modified_base (12)..(12): 2'-deoxy-2'-fluorouridine
  modified_base (13)..(13): um
  modified_base (14)..(14): 2'-deoxy-2'-fluorocytidine
  modified_base (15)..(15): um
  modified_base (16)..(16): 2'-deoxy-2'-fluorocytidine
  modified_base (17)..(17): cm
  modified_base (18)..(18): 2'-deoxy-2'-fluoroadenosine
  modified_base (19)..(19): gm
  modified_base (20)..(20): 2'-deoxy-2'-fluorouridine
  modified_base (21)..(21): gm
uccacaaugauuucuccagug

SEQ ID NO: 5426 - RNA, 21 nt, Artificial Sequence
  siRNA sense strand against b2GPI
  modified_base (1)..(1): 2'-deoxy-2'-fluorocytidine
  modified_base (2)..(2): cm
  misc_feature (2)..(3): 5'-phosphonothioate
  modified_base (3)..(3): 2'-deoxy-2'-fluoroadenosine
  modified_base (4)..(4): cm
  modified_base (5)..(5): 2'-deoxy-2'-fluoroadenosine
  modified_base (6)..(6): 2'-O-methyladenosine
  modified_base (7)..(7): 2'-deoxy-2'-fluorouridine
  modified_base (8)..(8): gm
  modified_base (9)..(9): 2'-deoxy-2'-fluoroadenosine
  modified_base (10)..(10): um
  modified_base (11)..(11): 2'-deoxy-2'-fluorouridine
  modified_base (12)..(12): 2'-deoxy-2'-fluorouridine
  modified_base (13)..(13): cm
  modified_base (14)..(14): 2'-deoxy-2'-fluorouridine
  modified_base (15)..(15): cm
  modified_base (16)..(16): 2'-deoxy-2'-fluorocytidine
  modified_base (17)..(17): 2'-O-methyladenosine
  modified_base (18)..(18): 2'-deoxy-2'-fluoroguanosine
  modified_base (19)..(19): um
  modified_base (20)..(20): 2'-deoxy-2'-fluoroguanosine
  modified_base (21)..(21): cm
ccacaaugauuucuccagugc

SEQ ID NO: 5427 - RNA, 21 nt, Artificial Sequence
  siRNA sense strand against b2GPI
  modified_base (1)..(1): 2'-deoxy-2'-fluorocytidine
  modified_base (2)..(2): 2'-O-methyladenosine
  misc_feature (2)..(3): 5'-phosphonothioate
  modified_base (3)..(3): 2'-deoxy-2'-fluorocytidine
  modified_base (4)..(4): 2'-O-methyladenosine
  modified_base (5)..(5): 2'-deoxy-2'-fluoroadenosine
  modified_base (6)..(6): um
  modified_base (7)..(7): 2'-deoxy-2'-fluoroguanosine
  modified_base (8)..(8): 2'-O-methyladenosine
  modified_base (9)..(9): 2'-deoxy-2'-fluorouridine
  modified_base (10)..(10): um
  modified_base (11)..(11): 2'-deoxy-2'-fluorouridine
  modified_base (12)..(12): 2'-deoxy-2'-fluorocytidine
  modified_base (13)..(13): um
  modified_base (14)..(14): 2'-deoxy-2'-fluorocytidine
  modified_base (15)..(15): cm
  modified_base (16)..(16): 2'-deoxy-2'-fluoroadenosine
  modified_base (17)..(17): gm
  modified_base (18)..(18): 2'-deoxy-2'-fluorouridine
  modified_base (19)..(19): gm
  modified_base (20)..(20): 2'-deoxy-2'-fluorocytidine
  modified_base (21)..(21): um
cacaaugauuucuccagugcu

SEQ ID NO: 5428 - RNA, 21 nt, Artificial Sequence
  siRNA sense strand against b2GPI
  modified_base (1)..(1): 2'-deoxy-2'-fluoroadenosine
  modified_base (2)..(2): cm
  misc_feature (2)..(3): 5'-phosphonothioate
  modified_base (3)..(3): 2'-deoxy-2'-fluoroadenosine
  modified_base (4)..(4): 2'-O-methyladenosine
  modified_base (5)..(5): 2'-deoxy-2'-fluorouridine
  modified_base (6)..(6): gm
  modified_base (7)..(7): 2'-deoxy-2'-fluoroadenosine
  modified_base (8)..(8): um
  modified_base (9)..(9): 2'-deoxy-2'-fluorouridine
  modified_base (10)..(10): um
  modified_base (11)..(11): 2'-deoxy-2'-fluorocytidine
  modified_base (12)..(12): 2'-deoxy-2'-fluorouridine
  modified_base (13)..(13): cm
  modified_base (14)..(14): 2'-deoxy-2'-fluorocytidine
  modified_base (15)..(15): 2'-O-methyladenosine
  modified_base (16)..(16): 2'-deoxy-2'-fluoroguanosine
  modified_base (17)..(17): um
  modified_base (18)..(18): 2'-deoxy-2'-fluoroguanosine
  modified_base (19)..(19): cm
  modified_base (20)..(20): 2'-deoxy-2'-fluorouridine
  modified_base (21)..(21): cm
acaaugauuucuccagugcuc

SEQ ID NO: 5429 - RNA, 21 nt, Artificial Sequence
  siRNA sense strand against b2GPI
  modified_base (1)..(1): 2'-deoxy-2'-fluorocytidine
  modified_base (2)..(2): 2'-O-methyladenosine
  misc_feature (2)..(3): 5'-phosphonothioate
  modified_base (3)..(3): 2'-deoxy-2'-fluoroadenosine
  modified_base (4)..(4): um
  modified_base (5)..(5): 2'-deoxy-2'-fluoroguanosine
  modified_base (6)..(6): 2'-O-methyladenosine
  modified_base (7)..(7): 2'-deoxy-2'-fluorouridine
  modified_base (8)..(8): um
  modified_base (9)..(9): 2'-deoxy-2'-fluorouridine
  modified_base (10)..(10): cm
  modified_base (11)..(11): 2'-deoxy-2'-fluorouridine
  modified_base (12)..(12): 2'-deoxy-2'-fluorocytidine
  modified_base (13)..(13): cm
  modified_base (14)..(14): 2'-deoxy-2'-fluoroadenosine
  modified_base (15)..(15): gm
  modified_base (16)..(16): 2'-deoxy-2'-fluorouridine
  modified_base (17)..(17): gm
  modified_base (18)..(18): 2'-deoxy-2'-fluorocytidine
  modified_base (19)..(19): um
  modified_base (20)..(20): 2'-deoxy-2'-fluorocytidine
  modified_base (21)..(21): 2'-O-methyladenosine
caaugauuucuccagugcuca

SEQ ID NO: 5430 - RNA, 21 nt, Artificial Sequence
  siRNA sense strand against b2GPI
  modified_base (1)..(1): 2'-deoxy-2'-fluoroadenosine
  modified_base (2)..(2): 2'-O-methyladenosine
  misc_feature (2)..(3): 5'-phosphonothioate
  modified_base (3)..(3): 2'-deoxy-2'-fluorouridine
  modified_base (4)..(4): gm
  modified_base (5)..(5): 2'-deoxy-2'-fluoroadenosine
  modified_base (6)..(6): um
  modified_base (7)..(7): 2'-deoxy-2'-fluorouridine
  modified_base (8)..(8): um
  modified_base (9)..(9): 2'-deoxy-2'-fluorocytidine
  modified_base (10)..(10): um
  modified_base (11)..(11): 2'-deoxy-2'-fluorocytidine
  modified_base (12)..(12): 2'-deoxy-2'-fluorocytidine
  modified_base (13)..(13): 2'-O-methyladenosine
  modified_base (14)..(14): 2'-deoxy-2'-fluoroguanosine
  modified_base (15)..(15): um
  modified_base (16)..(16): 2'-deoxy-2'-fluoroguanosine
  modified_base (17)..(17): cm
  modified_base (18)..(18): 2'-deoxy-2'-fluorouridine
  modified_base (19)..(19): cm
  modified_base (20)..(20): 2'-deoxy-2'-fluoroadenosine
  modified_base (21)..(21): um
aaugauuucuccagugcucau

SEQ ID NO: 5431 - RNA, 21 nt, Artificial Sequence
  siRNA sense strand against b2GPI
  modified_base (1)..(1): 2'-deoxy-2'-fluoroadenosine
  modified_base (2)..(2): um
  misc_feature (2)..(3): 5'-phosphonothioate
  modified_base (3)..(3): 2'-deoxy-2'-fluoroguanosine
  modified_base (4)..(4): 2'-O-methyladenosine
  modified_base (5)..(5): 2'-deoxy-2'-fluorouridine
  modified_base (6)..(6): um
  modified_base (7)..(7): 2'-deoxy-2'-fluorouridine
  modified_base (8)..(8): cm
  modified_base (9)..(9): 2'-deoxy-2'-fluorouridine
  modified_base (10)..(10): cm
  modified_base (11)..(11): 2'-deoxy-2'-fluorocytidine
  modified_base (12)..(12): 2'-deoxy-2'-fluoroadenosine
  modified_base (13)..(13): gm
  modified_base (14)..(14): 2'-deoxy-2'-fluorouridine
  modified_base (15)..(15): gm
  modified_base (16)..(16): 2'-deoxy-2'-fluorocytidine
  modified_base (17)..(17): um
  modified_base (18)..(18): 2'-deoxy-2'-fluorocytidine
  modified_base (19)..(19): 2'-O-methyladenosine
  modified_base (20)..(20): 2'-deoxy-2'-fluorouridine
  modified_base (21)..(21): cm
augauuucuccagugcucauc

SEQ ID NO: 5432 - RNA, 21 nt, Artificial Sequence
  siRNA sense strand against b2GPI
  modified_base (1)..(1): 2'-deoxy-2'-fluorouridine
  modified_base (2)..(2): gm
  misc_feature (2)..(3): 5'-phosphonothioate
  modified_base (3)..(3): 2'-deoxy-2'-fluoroadenosine
  modified_base (4)..(4): um
  modified_base (5)..(5): 2'-deoxy-2'-fluorouridine
  modified_base (6)..(6): um
  modified_base (7)..(7): 2'-deoxy-2'-fluorocytidine
  modified_base (8)..(8): um
  modified_base (9)..(9): 2'-deoxy-2'-fluorocytidine
  modified_base (10)..(10): cm
  modified_base (11)..(11): 2'-deoxy-2'-fluoroadenosine
  modified_base (12)..(12): 2'-deoxy-2'-fluoroguanosine
  modified_base (13)..(13): um
  modified_base (14)..(14): 2'-deoxy-2'-fluoroguanosine
  modified_base (15)..(15): cm
  modified_base (16)..(16): 2'-deoxy-2'-fluorouridine
  modified_base (17)..(17): cm
  modified_base (18)..(18): 2'-deoxy-2'-fluoroadenosine
  modified_base (19)..(19): um
  modified_base (20)..(20): 2'-deoxy-2'-fluorocytidine
  modified_base (21)..(21): um
ugauuucuccagugcucaucu

SEQ ID NO: 5433 - RNA, 21 nt, Artificial Sequence
  siRNA sense strand against b2GPI
  modified_base (1)..(1): 2'-deoxy-2'-fluoroguanosine
  modified_base (2)..(2): 2'-O-methyladenosine
  misc_feature (2)..(3): 5'-phosphonothioate
  modified_base (3)..(3): 2'-deoxy-2'-fluorouridine
  modified_base (4)..(4): um
  modified_base (5)..(5): 2'-deoxy-2'-fluorouridine
  modified_base (6)..(6): cm
  modified_base (7)..(7): 2'-deoxy-2'-fluorouridine
  modified_base (8)..(8): cm
  modified_base (9)..(9): 2'-deoxy-2'-fluorocytidine
  modified_base (10)..(10): 2'-O-methyladenosine
  modified_base (11)..(11): 2'-deoxy-2'-fluoroguanosine
  modified_base (12)..(12): 2'-deoxy-2'-fluorouridine
  modified_base (13)..(13): gm
  modified_base (14)..(14): 2'-deoxy-2'-fluorocytidine
  modified_base (15)..(15): um
  modified_base (16)..(16): 2'-deoxy-2'-fluorocytidine
  modified_base (17)..(17): 2'-O-methyladenosine
  modified_base (18)..(18): 2'-deoxy-2'-fluorouridine
  modified_base (19)..(19): cm
  modified_base (20)..(20): 2'-deoxy-2'-fluorouridine
  modified_base (21)..(21): um
gauuucuccagugcucaucuu

SEQ ID NO: 5434 - RNA, 21 nt, Artificial Sequence
  siRNA sense strand against b2GPI
  modified_base (1)..(1): 2'-deoxy-2'-fluoroadenosine
  modified_base (2)..(2): um
  misc_feature (2)..(3): 5'-phosphonothioate
  modified_base (3)..(3): 2'-deoxy-2'-fluorouridine
  modified_base (4)..(4): um
  modified_base (5)..(5): 2'-deoxy-2'-fluorocytidine
  modified_base (6)..(6): um
  modified_base (7)..(7): 2'-deoxy-2'-fluorocytidine
  modified_base (8)..(8): cm
  modified_base (9)..(9): 2'-deoxy-2'-fluoroadenosine
  modified_base (10)..(10): gm
  modified_base (11)..(11): 2'-deoxy-2'-fluorouridine
  modified_base (12)..(12): 2'-deoxy-2'-fluoroguanosine
  modified_base (13)..(13): cm
  modified_base (14)..(14): 2'-deoxy-2'-fluorouridine
  modified_base (15)..(15): cm
  modified_base (16)..(16): 2'-deoxy-2'-fluoroadenosine
  modified_base (17)..(17): um
  modified_base (18)..(18): 2'-deoxy-2'-fluorocytidine
  modified_base (19)..(19): um
  modified_base (20)..(20): 2'-deoxy-2'-fluorouridine
  modified_base (21)..(21): gm
auuucuccagugcucaucuug

SEQ ID NO: 5435 - RNA, 21 nt, Artificial Sequence
  siRNA sense strand against b2GPI
  modified_base (1)..(1): 2'-deoxy-2'-fluorouridine
  modified_base (2)..(2): um
  misc_feature (2)..(3): 5'-phosphonothioate
  modified_base (3)..(3): 2'-deoxy-2'-fluorouridine
  modified_base (4)..(4): cm
  modified_base (5)..(5): 2'-deoxy-2'-fluorouridine
  modified_base (6)..(6): cm
  modified_base (7)..(7): 2'-deoxy-2'-fluorocytidine
  modified_base (8)..(8): 2'-O-methyladenosine
  modified_base (9)..(9): 2'-deoxy-2'-fluoroguanosine
  modified_base (10)..(10): um
  modified_base (11)..(11): 2'-deoxy-2'-fluoroguanosine
  modified_base (12)..(12): 2'-deoxy-2'-fluorocytidine
  modified_base (13)..(13): um
  modified_base (14)..(14): 2'-deoxy-2'-fluorocytidine
  modified_base (15)..(15): 2'-O-methyladenosine
  modified_base (16)..(16): 2'-deoxy-2'-fluorouridine
  modified_base (17)..(17): cm
  modified_base (18)..(18): 2'-deoxy-2'-fluorouridine
  modified_base (19)..(19): um
  modified_base (20)..(20): 2'-deoxy-2'-fluoroguanosine
  modified_base (21)..(21): um
uuucuccagugcucaucuugu

SEQ ID NO: 5436 - RNA, 21 nt, Artificial Sequence
  siRNA sense strand against b2GPI
  modified_base (1)..(1): 2'-deoxy-2'-fluorouridine
  modified_base (2)..(2): um
  misc_feature (2)..(3): 5'-phosphonothioate
  modified_base (3)..(3): 2'-deoxy-2'-fluorocytidine
  modified_base (4)..(4): um
  modified_base (5)..(5): 2'-deoxy-2'-fluorocytidine
  modified_base (6)..(6): cm
  modified_base (7)..(7): 2'-deoxy-2'-fluoroadenosine
  modified_base (8)..(8): gm
  modified_base (9)..(9): 2'-deoxy-2'-fluorouridine
  modified_base (10)..(10): gm
  modified_base (11)..(11): 2'-deoxy-2'-fluorocytidine
  modified_base (12)..(12): 2'-deoxy-2'-fluorouridine
  modified_base (13)..(13): cm
  modified_base (14)..(14): 2'-deoxy-2'-fluoroadenosine
  modified_base (15)..(15): um
  modified_base (16)..(16): 2'-deoxy-2'-fluorocytidine
  modified_base (17)..(17): um
  modified_base (18)..(18): 2'-deoxy-2'-fluorouridine
  modified_base (19)..(19): gm
  modified_base (20)..(20): 2'-deoxy-2'-fluorouridine
  modified_base (21)..(21): um
uucuccagugcucaucuuguu

SEQ ID NO: 5437 - RNA, 21 nt, Artificial Sequence
  siRNA sense strand against b2GPI
  modified_base (1)..(1): 2'-deoxy-2'-fluorouridine
  modified_base (2)..(2): cm
  misc_feature (2)..(3): 5'-phosphonothioate
  modified_base (3)..(3): 2'-deoxy-2'-fluorouridine
  modified_base (4)..(4): cm
  modified_base (5)..(5): 2'-deoxy-2'-fluorocytidine
  modified_base (6)..(6): 2'-O-methyladenosine
  modified_base (7)..(7): 2'-deoxy-2'-fluoroguanosine
  modified_base (8)..(8): um
  modified_base (9)..(9): 2'-deoxy-2'-fluoroguanosine
  modified_base (10)..(10): cm
  modified_base (11)..(11): 2'-deoxy-2'-fluorouridine
  modified_base (12)..(12): 2'-deoxy-2'-fluorocytidine
  modified_base (13)..(13): 2'-O-methyladenosine
  modified_base (14)..(14): 2'-deoxy-2'-fluorouridine
  modified_base (15)..(15): cm
  modified_base (16)..(16): 2'-deoxy-2'-fluorouridine
  modified_base (17)..(17): um
  modified_base (18)..(18): 2'-deoxy-2'-fluoroguanosine
  modified_base (19)..(19): um
  modified_base (20)..(20): 2'-deoxy-2'-fluorouridine
  modified_base (21)..(21): cm
ucuccagugcucaucuuguuc

SEQ ID NO: 5438 - RNA, 21 nt, Artificial Sequence
  siRNA sense strand against b2GPI
  modified_base (1)..(1): 2'-deoxy-2'-fluorocytidine
  modified_base (2)..(2): um
  misc_feature (2)..(3): 5'-phosphonothioate
  modified_base (3)..(3): 2'-deoxy-2'-fluorocytidine
  modified_base (4)..(4): cm
  modified_base (5)..(5): 2'-deoxy-2'-fluoroadenosine
  modified_base (6)..(6): gm
  modified_base (7)..(7): 2'-deoxy-2'-fluorouridine
  modified_base (8)..(8): gm
  modified_base (9)..(9): 2'-deoxy-2'-fluorocytidine
  modified_base (10)..(10): um
  modified_base (11)..(11): 2'-deoxy-2'-fluorocytidine
  modified_base (12)..(12): 2'-deoxy-2'-fluoroadenosine
  modified_base (13)..(13): um
  modified_base (14)..(14): 2'-deoxy-2'-fluorocytidine
  modified_base (15)..(15): um
  modified_base (16)..(16): 2'-deoxy-2'-fluorouridine
  modified_base (17)..(17): gm
  modified_base (18)..(18): 2'-deoxy-2'-fluorouridine
  modified_base (19)..(19): um
  modified_base (20)..(20): 2'-deoxy-2'-fluorocytidine
  modified_base (21)..(21): um
cuccagugcucaucuuguucu

SEQ ID NO: 5439 - RNA, 21 nt, Artificial Sequence
  siRNA sense strand against b2GPI
  modified_base (1)..(1): 2'-deoxy-2'-fluorouridine
  modified_base (2)..(2): cm
  misc_feature (2)..(3): 5'-phosphonothioate
  modified_base (3)..(3): 2'-deoxy-2'-fluorocytidine
  modified_base (4)..(4): 2'-O-methyladenosine
  modified_base (5)..(5): 2'-deoxy-2'-fluoroguanosine
  modified_base (6)..(6): um
  modified_base (7)..(7): 2'-deoxy-2'-fluoroguanosine
  modified_base (8)..(8): cm
  modified_base (9)..(9): 2'-deoxy-2'-fluorouridine
  modified_base (10)..(10): cm
  modified_base (11)..(11): 2'-deoxy-2'-fluoroadenosine
  modified_base (12)..(12): 2'-deoxy-2'-fluorouridine
  modified_base (13)..(13): cm
  modified_base (14)..(14): 2'-deoxy-2'-fluorouridine
  modified_base (15)..(15): um
  modified_base (16)..(16): 2'-deoxy-2'-fluoroguanosine
  modified_base (17)..(17): um
  modified_base (18)..(18): 2'-deoxy-2'-fluorouridine
  modified_base (19)..(19): cm
  modified_base (20)..(20): 2'-deoxy-2'-fluorouridine
  modified_base (21)..(21): cm
uccagugcucaucuuguucuc

SEQ ID NO: 5440 - RNA, 21 nt, Artificial Sequence
  siRNA sense strand against b2GPI
  modified_base (1)..(1): 2'-deoxy-2'-fluorocytidine
  modified_base (2)..(2): cm
  misc_feature (2)..(3): 5'-phosphonothioate
  modified_base (3)..(3): 2'-deoxy-2'-fluoroadenosine
  modified_base (4)..(4): gm
  modified_base (5)..(5): 2'-deoxy-2'-fluorouridine
  modified_base (6)..(6): gm
  modified_base (7)..(7): 2'-deoxy-2'-fluorocytidine
  modified_base (8)..(8): um
  modified_base (9)..(9): 2'-deoxy-2'-fluorocytidine
  modified_base (10)..(10): 2'-O-methyladenosine
  modified_base (11)..(11): 2'-deoxy-2'-fluorouridine
  modified_base (12)..(12): 2'-deoxy-2'-fluorocytidine
  modified_base (13)..(13): um
  modified_base (14)..(14): 2'-deoxy-2'-fluorouridine
  modified_base (15)..(15): gm
  modified_base (16)..(16): 2'-deoxy-2'-fluorouridine
  modified_base (17)..(17): um
  modified_base (18)..(18): 2'-deoxy-2'-fluorocytidine
  modified_base (19)..(19): um
  modified_base (20)..(20): 2'-deoxy-2'-fluorocytidine
  modified_base (21)..(21): gm
ccagugcucaucuuguucucg

SEQ ID NO: 5441 - RNA, 21 nt, Artificial Sequence
  siRNA sense strand against b2GPI
  modified_base (1)..(1): 2'-deoxy-2'-fluorocytidine
  modified_base (2)..(2): 2'-O-methyladenosine
  misc_feature (2)..(3): 5'-phosphonothioate
  modified_base (3)..(3): 2'-deoxy-2'-fluoroguanosine
  modified_base (4)..(4): um
  modified_base (5)..(5): 2'-deoxy-2'-fluoroguanosine
  modified_base (6)..(6): cm
  modified_base (7)..(7): 2'-deoxy-2'-fluorouridine
  modified_base (8)..(8): cm
  modified_base (9)..(9): 2'-deoxy-2'-fluoroadenosine
  modified_base (10)..(10): um
  modified_base (11)..(11): 2'-deoxy-2'-fluorocytidine
  modified_base (12)..(12): 2'-deoxy-2'-fluorouridine
  modified_base (13)..(13): um
  modified_base (14)..(14): 2'-deoxy-2'-fluoroguanosine
  modified_base (15)..(15): um
  modified_base (16)..(16): 2'-deoxy-2'-fluorouridine
  modified_base (17)..(17): cm
  modified_base (18)..(18): 2'-deoxy-2'-fluorouridine
  modified_base (19)..(19): cm
  modified_base (20)..(20): 2'-deoxy-2'-fluoroguanosine
  modified_base (21)..(21): 2'-O-methyladenosine
cagugcucaucuuguucucga

SEQ ID NO: 5442 - RNA, 21 nt, Artificial Sequence
  siRNA sense strand against b2GPI
  modified_base (1)..(1): 2'-deoxy-2'-fluoroadenosine
  modified_base (2)..(2): gm
  misc_feature (2)..(3): 5'-phosphonothioate
  modified_base (3)..(3): 2'-deoxy-2'-fluorouridine
  modified_base (4)..(4): gm
  modified_base (5)..(5): 2'-deoxy-2'-fluorocytidine
  modified_base (6)..(6): um
  modified_base (7)..(7): 2'-deoxy-2'-fluorocytidine
  modified_base (8)..(8): 2'-O-methyladenosine
  modified_base (9)..(9): 2'-deoxy-2'-fluorouridine
  modified_base (10)..(10): cm
  modified_base (11)..(11): 2'-deoxy-2'-fluorouridine
  modified_base (12)..(12): 2'-deoxy-2'-fluorouridine
  modified_base (13)..(13): gm
  modified_base (14)..(14): 2'-deoxy-2'-fluorouridine
  modified_base (15)..(15): um
  modified_base (16)..(16): 2'-deoxy-2'-fluorocytidine
  modified_base (17)..(17): um
  modified_base (18)..(18): 2'-deoxy-2'-fluorocytidine
  modified_base (19)..(19): gm
  modified_base (20)..(20): 2'-deoxy-2'-fluoroadenosine
  modified_base (21)..(21): gm
agugcucaucuuguucucgag

SEQ ID NO: 5443 - RNA, 21 nt, Artificial Sequence
  siRNA sense strand against b2GPI
  modified_base (1)..(1): 2'-deoxy-2'-fluoroguanosine
  modified_base (2)..(2): um
  misc_feature (2)..(3): 5'-phosphonothioate
  modified_base (3)..(3): 2'-deoxy-2'-fluoroguanosine
  modified_base (4)..(4): cm
  modified_base (5)..(5): 2'-deoxy-2'-fluorouridine
  modified_base (6)..(6): cm
  modified_base (7)..(7): 2'-deoxy-2'-fluoroadenosine
  modified_base (8)..(8): um
  modified_base (9)..(9): 2'-deoxy-2'-fluorocytidine
  modified_base (10)..(10): um
  modified_base (11)..(11): 2'-deoxy-2'-fluorouridine
  modified_base (12)..(12): 2'-deoxy-2'-fluoroguanosine
  modified_base (13)..(13): um
  modified_base (14)..(14): 2'-deoxy-2'-fluorouridine
  modified_base (15)..(15): cm
  modified_base (16)..(16): 2'-deoxy-2'-fluorouridine
  modified_base (17)..(17): cm
  modified_base (18)..(18): 2'-deoxy-2'-fluoroguanosine
  modified_base (19)..(19): 2'-O-methyladenosine
  modified_base (20)..(20): 2'-deoxy-2'-fluoroguanosine
  modified_base (21)..(21): um
gugcucaucuuguucucgagu

SEQ ID NO: 5444 - RNA, 21 nt, Artificial Sequence
  siRNA sense strand against b2GPI
  modified_base (1)..(1): 2'-deoxy-2'-fluorouridine
  modified_base (2)..(2): gm
  misc_feature (2)..(3): 5'-phosphonothioate
  modified_base (3)..(3): 2'-deoxy-2'-fluorocytidine
  modified_base (4)..(4): um
  modified_base (5)..(5): 2'-deoxy-2'-fluorocytidine
  modified_base (6)..(6): 2'-O-methyladenosine
  modified_base (7)..(7): 2'-deoxy-2'-fluorouridine
  modified_base (8)..(8): cm
  modified_base (9)..(9): 2'-deoxy-2'-fluorouridine
  modified_base (10)..(10): um
  modified_base (11)..(11): 2'-deoxy-2'-fluoroguanosine
  modified_base (12)..(12): 2'-deoxy-2'-fluorouridine
  modified_base (13)..(13): um
  modified_base (14)..(14): 2'-deoxy-2'-fluorocytidine
  modified_base (15)..(15): um
  modified_base (16)..(16): 2'-deoxy-2'-fluorocytidine
  modified_base (17)..(17): gm
  modified_base (18)..(18): 2'-deoxy-2'-fluoroadenosine
  modified_base (19)..(19): gm
  modified_base (20)..(20): 2'-deoxy-2'-fluorouridine
  modified_base (21)..(21): um
ugcucaucuuguucucgaguu

SEQ ID NO: 5445 - RNA, 21 nt, Artificial Sequence
  siRNA sense strand against b2GPI
  modified_base (1)..(1): 2'-deoxy-2'-fluoroguanosine
  modified_base (2)..(2): cm
  misc_feature (2)..(3): 5'-phosphonothioate
  modified_base (3)..(3): 2'-deoxy-2'-fluorouridine
  modified_base (4)..(4): cm
  modified_base (5)..(5): 2'-deoxy-2'-fluoroadenosine
  modified_base (6)..(6): um
  modified_base (7)..(7): 2'-deoxy-2'-fluorocytidine
  modified_base (8)..(8): um
  modified_base (9)..(9): 2'-deoxy-2'-fluorouridine
  modified_base (10)..(10): gm
  modified_base (11)..(11): 2'-deoxy-2'-fluorouridine
  modified_base (12)..(12): 2'-deoxy-2'-fluorouridine
  modified_base (13)..(13): cm
  modified_base (14)..(14): 2'-deoxy-2'-fluorouridine
  modified_base (15)..(15): cm
  modified_base (16)..(16): 2'-deoxy-2'-fluoroguanosine
  modified_base (17)..(17): 2'-O-methyladenosine
  modified_base (18)..(18): 2'-deoxy-2'-fluoroguanosine
  modified_base (19)..(19): um
  modified_base (20)..(20): 2'-deoxy-2'-fluorouridine
  modified_base (21)..(21): um
gcucaucuuguucucgaguuu

SEQ ID NO: 5446 - RNA, 21 nt, Artificial Sequence
  siRNA sense strand against b2GPI
  modified_base (1)..(1): 2'-deoxy-2'-fluorocytidine
  modified_base (2)..(2): um
  misc_feature (2)..(3): 5'-phosphonothioate
  modified_base (3)..(3): 2'-deoxy-2'-fluorocytidine
  modified_base (4)..(4): 2'-O-methyladenosine
  modified_base (5)..(5): 2'-deoxy-2'-fluorouridine
  modified_base (6)..(6): cm
  modified_base (7)..(7): 2'-deoxy-2'-fluorouridine
  modified_base (8)..(8): um
  modified_base (9)..(9): 2'-deoxy-2'-fluoroguanosine
  modified_base (10)..(10): um
  modified_base (11)..(11): 2'-deoxy-2'-fluorouridine
  modified_base (12)..(12): 2'-deoxy-2'-fluorocytidine
  modified_base (13)..(13): um
  modified_base (14)..(14): 2'-deoxy-2'-fluorocytidine
  modified_base (15)..(15): gm
  modified_base (16)..(16): 2'-deoxy-2'-fluoroadenosine
  modified_base (17)..(17): gm
  modified_base (18)..(18): 2'-deoxy-2'-fluorouridine
  modified_base (19)..(19): um
  modified_base (20)..(20): 2'-deoxy-2'-fluorouridine
  modified_base (21)..(21): um
cucaucuuguucucgaguuuu

SEQ ID NO: 5447 - RNA, 21 nt, Artificial Sequence
  siRNA sense strand against b2GPI
  modified_base (1)..(1): 2'-deoxy-2'-fluorouridine
  modified_base (2)..(2): cm
  misc_feature (2)..(3): 5'-phosphonothioate
  modified_base (3)..(3): 2'-deoxy-2'-fluoroadenosine
  modified_base (4)..(4): um
  modified_base (5)..(5): 2'-deoxy-2'-fluorocytidine
  modified_base (6)..(6): um
  modified_base (7)..(7): 2'-deoxy-2'-fluorouridine
  modified_base (8)..(8): gm
  modified_base (9)..(9): 2'-deoxy-2'-fluorouridine
  modified_base (10)..(10): um
  modified_base (11)..(11): 2'-deoxy-2'-fluorocytidine
  modified_base (12)..(12): 2'-deoxy-2'-fluorouridine
  modified_base (13)..(13): cm
  modified_base (14)..(14): 2'-deoxy-2'-fluoroguanosine
  modified_base (15)..(15): 2'-O-methyladenosine
  modified_base (16)..(16): 2'-deoxy-2'-fluoroguanosine
  modified_base (17)..(17): um
  modified_base (18)..(18): 2'-deoxy-2'-fluorouridine
  modified_base (19)..(19): um
  modified_base (20)..(20): 2'-deoxy-2'-fluorouridine
  modified_base (21)..(21): cm
ucaucuuguucucgaguuuuc

SEQ ID NO: 5448 - RNA, 21 nt, Artificial Sequence
  siRNA sense strand against b2GPI
  modified_base (1)..(1): 2'-deoxy-2'-fluorocytidine
  modified_base (2)..(2): 2'-O-methyladenosine
  misc_feature (2)..(3): 5'-phosphonothioate
  modified_base (3)..(3): 2'-deoxy-2'-fluorouridine
  modified_base (4)..(4): cm
  modified_base (5)..(5): 2'-deoxy-2'-fluorouridine
  modified_base (6)..(6): um
  modified_base (7)..(7): 2'-deoxy-2'-fluoroguanosine
  modified_base (8)..(8): um
  modified_base (9)..(9): 2'-deoxy-2'-fluorouridine
  modified_base (10)..(10): cm
  modified_base (11)..(11): 2'-deoxy-2'-fluorouridine
  modified_base (12)..(12): 2'-deoxy-2'-fluorocytidine
  modified_base (13)..(13): gm
  modified_base (14)..(14): 2'-deoxy-2'-fluoroadenosine
  modified_base (15)..(15): gm
  modified_base (16)..(16): 2'-deoxy-2'-fluorouridine
  modified_base (17)..(17): um
  modified_base (18)..(18): 2'-deoxy-2'-fluorouridine
  modified_base (19)..(19): um
  modified_base (20)..(20): 2'-deoxy-2'-fluorocytidine
  modified_base (21)..(21): um
caucuuguucucgaguuuucu

SEQ ID NO: 5449 - RNA, 21 nt, Artificial Sequence
  siRNA sense strand against b2GPI
  modified_base (1)..(1): 2'-deoxy-2'-fluoroadenosine
  modified_base (2)..(2): um
  misc_feature (2)..(3): 5'-phosphonothioate
  modified_base (3)..(3): 2'-deoxy-2'-fluorocytidine
  modified_base (4)..(4): um
  modified_base (5)..(5): 2'-deoxy-2'-fluorouridine
  modified_base (6)..(6): gm
  modified_base (7)..(7): 2'-deoxy-2'-fluorouridine
  modified_base (8)..(8): um
  modified_base (9)..(9): 2'-deoxy-2'-fluorocytidine
  modified_base (10)..(10): um
  modified_base (11)..(11): 2'-deoxy-2'-fluorocytidine
  modified_base (12)..(12): 2'-deoxy-2'-fluoroguanosine
  modified_base (13)..(13): 2'-O-methyladenosine
  modified_base (14)..(14): 2'-deoxy-2'-fluoroguanosine
  modified_base (15)..(15): um
  modified_base (16)..(16): 2'-deoxy-2'-fluorouridine
  modified_base (17)..(17): um
  modified_base (18)..(18): 2'-deoxy-2'-fluorouridine
  modified_base (19)..(19): cm
  modified_base (20)..(20): 2'-deoxy-2'-fluorouridine
  modified_base (21)..(21): cm
aucuuguucucgaguuuucuc

SEQ ID NO: 5450 - RNA, 21 nt, Artificial Sequence
  siRNA sense strand against b2GPI
  modified_base (1)..(1): 2'-deoxy-2'-fluorouridine
  modified_base (2)..(2): cm
  misc_feature (2)..(3): 5'-phosphonothioate
  modified_base (3)..(3): 2'-deoxy-2'-fluorouridine
  modified_base (4)..(4): um
  modified_base (5)..(5): 2'-deoxy-2'-fluoroguanosine
  modified_base (6)..(6): um
  modified_base (7)..(7): 2'-deoxy-2'-fluorouridine
  modified_base (8)..(8): cm
  modified_base (9)..(9): 2'-deoxy-2'-fluorouridine
  modified_base (10)..(10): cm
  modified_base (11)..(11): 2'-deoxy-2'-fluoroguanosine
  modified_base (12)..(12): 2'-deoxy-2'-fluoroadenosine
  modified_base (13)..(13): gm
  modified_base (14)..(14): 2'-deoxy-2'-fluorouridine
  modified_base (15)..(15): um
  modified_base (16)..(16): 2'-deoxy-2'-fluorouridine
  modified_base (17)..(17): um
  modified_base (18)..(18): 2'-deoxy-2'-fluorocytidine
  modified_base (19)..(19): um
  modified_base (20)..(20): 2'-deoxy-2'-fluorocytidine
  modified_base (21)..(21): um
ucuuguucucgaguuuucucu

SEQ ID NO: 5451 - RNA, 21 nt, Artificial Sequence
  siRNA sense strand against b2GPI
  modified_base (1)..(1): 2'-deoxy-2'-fluorocytidine
  modified_base (2)..(2): um
  misc_feature (2)..(3): 5'-phosphonothioate
  modified_base (3)..(3): 2'-deoxy-2'-fluorouridine
  modified_base (4)..(4): gm
  modified_base (5)..(5): 2'-deoxy-2'-fluorouridine
  modified_base (6)..(6): um
  modified_base (7)..(7): 2'-deoxy-2'-fluorocytidine
  modified_base (8)..(8): um
  modified_base (9)..(9): 2'-deoxy-2'-fluorocytidine
  modified_base (10)..(10): gm
  modified_base (11)..(11): 2'-deoxy-2'-fluoroadenosine
  modified_base (12)..(12): 2'-deoxy-2'-fluoroguanosine
  modified_base (13)..(13): um
  modified_base (14)..(14): 2'-deoxy-2'-fluorouridine
  modified_base (15)..(15): um
  modified_base (16)..(16): 2'-deoxy-2'-fluorouridine
  modified_base (17)..(17): cm
  modified_base (18)..(18): 2'-deoxy-2'-fluorouridine
  modified_base (19)..(19): cm
  modified_base (20)..(20): 2'-deoxy-2'-fluorouridine
  modified_base (21)..(21): gm
cuuguucucgaguuuucucug

SEQ ID NO: 5452 - RNA, 21 nt, Artificial Sequence
  siRNA sense strand against b2GPI
  modified_base (1)..(1): 2'-deoxy-2'-fluorouridine
  modified_base (2)..(2): um
  misc_feature (2)..(3): 5'-phosphonothioate
  modified_base (3)..(3): 2'-deoxy-2'-fluoroguanosine
  modified_base (4)..(4): um
  modified_base (5)..(5): 2'-deoxy-2'-fluorouridine
  modified_base (6)..(6): cm
  modified_base (7)..(7): 2'-deoxy-2'-fluorouridine
  modified_base (8)..(8): cm
  modified_base (9)..(9): 2'-deoxy-2'-fluoroguanosine
  modified_base (10)..(10): 2'-O-methyladenosine
  modified_base (11)..(11): 2'-deoxy-2'-fluoroguanosine
  modified_base (12)..(12): 2'-deoxy-2'-fluorouridine
  modified_base (13)..(13): um
  modified_base (14)..(14): 2'-deoxy-2'-fluorouridine
  modified_base (15)..(15): um
  modified_base (16)..(16): 2'-deoxy-2'-fluorocytidine
  modified_base (17)..(17): um
  modified_base (18)..(18): 2'-deoxy-2'-fluorocytidine
  modified_base (19)..(19): um
  modified_base (20)..(20): 2'-deoxy-2'-fluoroguanosine
  modified_base (21)..(21): cm
uuguucucgaguuuucucugc

SEQ ID NO: 5453 - RNA, 21 nt, Artificial Sequence
  siRNA sense strand against b2GPI
  modified_base (1)..(1): 2'-deoxy-2'-fluoroguanosine
  modified_base (2)..(2): um
  misc_feature (2)..(3): 5'-phosphonothioate
  modified_base (3)..(3): 2'-deoxy-2'-fluorouridine
  modified_base (4)..(4): cm
  modified_base (5)..(5): 2'-deoxy-2'-fluorouridine
  modified_base (6)..(6): cm
  modified_base (7)..(7): 2'-deoxy-2'-fluoroguanosine
  modified_base (8)..(8): 2'-O-methyladenosine
  modified_base (9)..(9): 2'-deoxy-2'-fluoroguanosine
  modified_base (10)..(10): um
  modified_base (11)..(11): 2'-deoxy-2'-fluorouridine
  modified_base (12)..(12): 2'-deoxy-2'-fluorouridine
  modified_base (13)..(13): um
  modified_base (14)..(14): 2'-deoxy-2'-fluorocytidine
  modified_base (15)..(15): um
  modified_base (16)..(16): 2'-deoxy-2'-fluorocytidine
  modified_base (17)..(17): um
  modified_base (18)..(18): 2'-deoxy-2'-fluoroguanosine
  modified_base (19)..(19): cm
  modified_base (20)..(20): 2'-deoxy-2'-fluorocytidine
  modified_base (21)..(21): 2'-O-methyladenosine
guucucgaguuuucucugcca

SEQ ID NO: 5454 - RNA, 21 nt, Artificial Sequence
  siRNA sense strand against b2GPI
  modified_base (1)..(1): 2'-deoxy-2'-fluorouridine
  modified_base (2)..(2): um
  misc_feature (2)..(3): 5'-phosphonothioate
  modified_base (3)..(3): 2'-deoxy-2'-fluorocytidine
  modified_base (4)..(4): um
  modified_base (5)..(5): 2'-deoxy-2'-fluorocytidine
  modified_base (6)..(6): gm
  modified_base (7)..(7): 2'-deoxy-2'-fluoroadenosine
  modified_base (8)..(8): gm
  modified_base (9)..(9): 2'-deoxy-2'-fluorouridine
  modified_base (10)..(10): um
  modified_base (11)..(11): 2'-deoxy-2'-fluorouridine
  modified_base (12)..(12): 2'-deoxy-2'-fluorouridine
  modified_base (13)..(13): cm
  modified_base (14)..(14): 2'-deoxy-2'-fluorouridine
  modified_base (15)..(15): cm
  modified_base (16)..(16): 2'-deoxy-2'-fluorouridine
  modified_base (17)..(17): gm
  modified_base (18)..(18): 2'-deoxy-2'-fluorocytidine
  modified_base (19)..(19): cm
  modified_base (20)..(20): 2'-deoxy-2'-fluoroadenosine
  modified_base (21)..(21): um
uucucgaguuuucucugccau

SEQ ID NO: 5455 - RNA, 21 nt, Artificial Sequence
  siRNA sense strand against b2GPI
  modified_base (1)..(1): 2'-deoxy-2'-fluorouridine
  modified_base (2)..(2): cm
  misc_feature (2)..(3): 5'-phosphonothioate
  modified_base (3)..(3): 2'-deoxy-2'-fluorouridine
  modified_base (4)..(4): cm
  modified_base (5)..(5): 2'-deoxy-2'-fluoroguanosine
  modified_base (6)..(6): 2'-O-methyladenosine
  modified_base (7)..(7): 2'-deoxy-2'-fluoroguanosine
  modified_base (8)..(8): um
  modified_base (9)..(9): 2'-deoxy-2'-fluorouridine
  modified_base (10)..(10): um
  modified_base (11)..(11): 2'-deoxy-2'-fluorouridine
  modified_base (12)..(12): 2'-deoxy-2'-fluorocytidine
  modified_base (13)..(13): um
  modified_base (14)..(14): 2'-deoxy-2'-fluorocytidine
  modified_base (15)..(15): um
  modified_base (16)..(16): 2'-deoxy-2'-fluoroguanosine
  modified_base (17)..(17): cm
  modified_base (18)..(18): 2'-deoxy-2'-fluorocytidine
  modified_base (19)..(19): 2'-O-methyladenosine
  modified_base (20)..(20): 2'-deoxy-2'-fluorouridine
  modified_base (21)..(21): gm
ucucgaguuuucucugccaug

SEQ ID NO: 5456 - RNA, 21 nt, Artificial Sequence
  siRNA sense strand against b2GPI
  modified_base (1)..(1): 2'-deoxy-2'-fluorocytidine
  modified_base (2)..(2): um
  misc_feature (2)..(3): 5'-phosphonothioate
  modified_base (3)..(3): 2'-deoxy-2'-fluorocytidine
  modified_base (4)..(4): gm
  modified_base (5)..(5): 2'-deoxy-2'-fluoroadenosine
  modified_base (6)..(6): gm
  modified_base (7)..(7): 2'-deoxy-2'-fluorouridine
  modified_base (8)..(8): um
  modified_base (9)..(9): 2'-deoxy-2'-fluorouridine
  modified_base (10)..(10): um
  modified_base (11)..(11): 2'-deoxy-2'-fluorocytidine
  modified_base (12)..(12): 2'-deoxy-2'-fluorouridine
  modified_base (13)..(13): cm
  modified_base (14)..(14): 2'-deoxy-2'-fluorouridine
  modified_base (15)..(15): gm
  modified_base (16)..(16): 2'-deoxy-2'-fluorocytidine
  modified_base (17)..(17): cm
  modified_base (18)..(18): 2'-deoxy-2'-fluoroadenosine
  modified_base (19)..(19): um
  modified_base (20)..(20): 2'-deoxy-2'-fluoroguanosine
  modified_base (21)..(21): um
cucgaguuuucucugccaugu

SEQ ID NO: 5457 - RNA, 21 nt, Artificial Sequence
  siRNA sense strand against b2GPI
  modified_base (1)..(1): 2'-deoxy-2'-fluorouridine
  modified_base (2)..(2): cm
  misc_feature (2)..(3): 5'-phosphonothioate
  modified_base (3)..(3): 2'-deoxy-2'-fluoroguanosine
  modified_base (4)..(4): 2'-O-methyladenosine
  modified_base (5)..(5): 2'-deoxy-2'-fluoroguanosine
  modified_base (6)..(6): um
  modified_base (7)..(7): 2'-deoxy-2'-fluorouridine
  modified_base (8)..(8): um
  modified_base (9)..(9): 2'-deoxy-2'-fluorouridine
  modified_base (10)..(10): cm
  modified_base (11)..(11): 2'-deoxy-2'-fluorouridine
  modified_base (12)..(12): 2'-deoxy-2'-fluorocytidine
  modified_base (13)..(13): um
  modified_base (14)..(14): 2'-deoxy-2'-fluoroguanosine
  modified_base (15)..(15): cm
  modified_base (16)..(16): 2'-deoxy-2'-fluorocytidine
  modified_base (17)..(17): 2'-O-methyladenosine
  modified_base (18)..(18): 2'-deoxy-2'-fluorouridine
  modified_base (19)..(19): gm
  modified_base (20)..(20): 2'-deoxy-2'-fluorouridine
  modified_base (21)..(21): um
ucgaguuuucucugccauguu

SEQ ID NO: 5458 - RNA, 21 nt, Artificial Sequence
  siRNA sense strand against b2GPI
  modified_base (1)..(1): 2'-deoxy-2'-fluorocytidine
  modified_base (2)..(2): gm
  misc_feature (2)..(3): 5'-phosphonothioate
  modified_base (3)..(3): 2'-deoxy-2'-fluoroadenosine
  modified_base (4)..(4): gm
  modified_base (5)..(5): 2'-deoxy-2'-fluorouridine
  modified_base (6)..(6): um
  modified_base (7)..(7): 2'-deoxy-2'-fluorouridine
  modified_base (8)..(8): um
  modified_base (9)..(9): 2'-deoxy-2'-fluorocytidine
  modified_base (10)..(10): um
  modified_base (11)..(11): 2'-deoxy-2'-fluorocytidine
  modified_base (12)..(12): 2'-deoxy-2'-fluorouridine
  modified_base (13)..(13): gm
  modified_base (14)..(14): 2'-deoxy-2'-fluorocytidine
  modified_base (15)..(15): cm
  modified_base (16)..(16): 2'-deoxy-2'-fluoroadenosine
  modified_base (17)..(17): um
  modified_base (18)..(18): 2'-deoxy-2'-fluoroguanosine
  modified_base (19)..(19): um
  modified_base (20)..(20): 2'-deoxy-2'-fluorouridine
  modified_base (21)..(21): gm
cgaguuuucucugccauguug

SEQ ID NO: 5459 - RNA, 21 nt, Artificial Sequence
  siRNA sense strand against b2GPI
  modified_base (1)..(1): 2'-deoxy-2'-fluoroguanosine
  modified_base (2)..(2): 2'-O-methyladenosine
  misc_feature (2)..(3): 5'-phosphonothioate
  modified_base (3)..(3): 2'-deoxy-2'-fluoroguanosine
  modified_base (4)..(4): um
  modified_base (5)..(5): 2'-deoxy-2'-fluorouridine
  modified_base (6)..(6): um
  modified_base (7)..(7): 2'-deoxy-2'-fluorouridine
  modified_base (8)..(8): cm
  modified_base (9)..(9): 2'-deoxy-2'-fluorouridine
  modified_base (10)..(10): cm
  modified_base (11)..(11): 2'-deoxy-2'-fluorouridine
  modified_base (12)..(12): 2'-deoxy-2'-fluoroguanosine
  modified_base (13)..(13): cm
  modified_base (14)..(14): 2'-deoxy-2'-fluorocytidine
  modified_base (15)..(15): 2'-O-methyladenosine
  modified_base (16)..(16): 2'-deoxy-2'-fluorouridine
  modified_base (17)..(17): gm
  modified_base (18)..(18): 2'-deoxy-2'-fluorouridine
  modified_base (19)..(19): um
  modified_base (20)..(20): 2'-deoxy-2'-fluoroguanosine
  modified_base (21)..(21): cm
gaguuuucucugccauguugc

SEQ ID NO: 5460 - RNA, 21 nt, Artificial Sequence
  siRNA sense strand against b2GPI
  modified_base (1)..(1): 2'-deoxy-2'-fluoroadenosine
  modified_base (2)..(2): gm
  misc_feature (2)..(3): 5'-phosphonothioate
  modified_base (3)..(3): 2'-deoxy-2'-fluorouridine
  modified_base (4)..(4): um
  modified_base (5)..(5): 2'-deoxy-2'-fluorouridine
  modified_base (6)..(6): um
  modified_base (7)..(7): 2'-deoxy-2'-fluorocytidine
  modified_base (8)..(8): um
  modified_base (9)..(9): 2'-deoxy-2'-fluorocytidine
  modified_base (10)..(10): um
  modified_base (11)..(11): 2'-deoxy-2'-fluoroguanosine
  modified_base (12)..(12): 2'-deoxy-2'-fluorocytidine
  modified_base (13)..(13): cm
  modified_base (14)..(14): 2'-deoxy-2'-fluoroadenosine
  modified_base (15)..(15): um
  modified_base (16)..(16): 2'-deoxy-2'-fluoroguanosine
  modified_base (17)..(17): um
  modified_base (18)..(18): 2'-deoxy-2'-fluorouridine
  modified_base (19)..(19): gm
  modified_base (20)..(20): 2'-deoxy-2'-fluorocytidine
  modified_base (21)..(21): um
aguuuucucugccauguugcu

SEQ ID NO: 5461 - RNA, 21 nt, Artificial Sequence
  siRNA sense strand against b2GPI
  modified_base (1)..(1): 2'-deoxy-2'-fluoroguanosine
  modified_base (2)..(2): um
  misc_feature (2)..(3): 5'-phosphonothioate
  modified_base (3)..(3): 2'-deoxy-2'-fluorouridine
  modified_base (4)..(4): um
  modified_base (5)..(5): 2'-deoxy-2'-fluorouridine
  modified_base (6)..(6): cm
  modified_base (7)..(7): 2'-deoxy-2'-fluorouridine
  modified_base (8)..(8): cm
  modified_base (9)..(9): 2'-deoxy-2'-fluorouridine
  modified_base (10)..(10): gm
  modified_base (11)..(11): 2'-deoxy-2'-fluorocytidine
  modified_base (12)..(12): 2'-deoxy-2'-fluorocytidine
  modified_base (13)..(13): 2'-O-methyladenosine
  modified_base (14)..(14): 2'-deoxy-2'-fluorouridine
  modified_base (15)..(15): gm
  modified_base (16)..(16): 2'-deoxy-2'-fluorouridine
  modified_base (17)..(17): um
  modified_base (18)..(18): 2'-deoxy-2'-fluoroguanosine
  modified_base (19)..(19): cm
  modified_base (20)..(20): 2'-deoxy-2'-fluorouridine
  modified_base (21)..(21): 2'-O-methyladenosine
guuuucucugccauguugcua

SEQ ID NO: 5462 - RNA, 21 nt, Artificial Sequence
  siRNA sense strand against b2GPI
  modified_base (1)..(1): 2'-deoxy-2'-fluorouridine
  modified_base (2)..(2): um
  misc_feature (2)..(3): 5'-phosphonothioate
  modified_base (3)..(3): 2'-deoxy-2'-fluorouridine
  modified_base (4)..(4): um
  modified_base (5)..(5): 2'-deoxy-2'-fluorocytidine
  modified_base (6)..(6): um
  modified_base (7)..(7): 2'-deoxy-2'-fluorocytidine
  modified_base (8)..(8): um
  modified_base (9)..(9): 2'-deoxy-2'-fluoroguanosine
  modified_base (10)..(10): cm
  modified_base (11)..(11): 2'-deoxy-2'-fluorocytidine
  modified_base (12)..(12): 2'-deoxy-2'-fluoroadenosine
  modified_base (13)..(13): um
  modified_base (14)..(14): 2'-deoxy-2'-fluoroguanosine
  modified_base (15)..(15): um
  modified_base (16)..(16): 2'-deoxy-2'-fluorouridine
  modified_base (17)..(17): gm
  modified_base (18)..(18): 2'-deoxy-2'-fluorocytidine
  modified_base (19)..(19): um
  modified_base (20)..(20): 2'-deoxy-2'-fluoroadenosine
  modified_base (21)..(21): um
uuuucucugccauguugcuau

SEQ ID NO: 5463 - RNA, 21 nt, Artificial Sequence
  siRNA sense strand against b2GPI
  modified_base (1)..(1): 2'-deoxy-2'-fluorouridine
  modified_base (2)..(2): um
  misc_feature (2)..(3): 5'-phosphonothioate
  modified_base (3)..(3): 2'-deoxy-2'-fluorouridine
  modified_base (4)..(4): cm
  modified_base (5)..(5): 2'-deoxy-2'-fluorouridine
  modified_base (6)..(6): cm
  modified_base (7)..(7): 2'-deoxy-2'-fluorouridine
  modified_base (8)..(8): gm
  modified_base (9)..(9): 2'-deoxy-2'-fluorocytidine
  modified_base (10)..(10): cm
  modified_base (11)..(11): 2'-deoxy-2'-fluoroadenosine
  modified_base (12)..(12): 2'-deoxy-2'-fluorouridine
  modified_base (13)..(13): gm
  modified_base (14)..(14): 2'-deoxy-2'-fluorouridine
  modified_base (15)..(15): um
  modified_base (16)..(16): 2'-deoxy-2'-fluoroguanosine
  modified_base (17)..(17): cm
  modified_base (18)..(18): 2'-deoxy-2'-fluorouridine
  modified_base (19)..(19): 2'-O-methyladenosine
  modified_base (20)..(20): 2'-deoxy-2'-fluorouridine
  modified_base (21)..(21): um
uuucucugccauguugcuauu

SEQ ID NO: 5464 - RNA, 21 nt, Artificial Sequence
  siRNA sense strand against b2GPI
  modified_base (1)..(1): 2'-deoxy-2'-fluorocytidine
  modified_base (2)..(2): um
  misc_feature (2)..(3): 5'-phosphonothioate
  modified_base (3)..(3): 2'-deoxy-2'-fluorocytidine
  modified_base (4)..(4): um
  modified_base (5)..(5): 2'-deoxy-2'-fluoroguanosine
  modified_base (6)..(6): cm
  modified_base (7)..(7): 2'-deoxy-2'-fluorocytidine
  modified_base (8)..(8): 2'-O-methyladenosine
  modified_base (9)..(9): 2'-deoxy-2'-fluorouridine
  modified_base (10)..(10): gm
  modified_base (11)..(11): 2'-deoxy-2'-fluorouridine
  modified_base (12)..(12): 2'-deoxy-2'-fluorouridine
  modified_base (13)..(13): gm
  modified_base (14)..(14): 2'-deoxy-2'-fluorocytidine
  modified_base (15)..(15): um
  modified_base (16)..(16): 2'-deoxy-2'-fluoroadenosine
  modified_base (17)..(17): um
  modified_base (18)..(18): 2'-deoxy-2'-fluorouridine
  modified_base (19)..(19): gm
  modified_base (20)..(20): 2'-deoxy-2'-fluorocytidine
  modified_base (21)..(21): 2'-O-methyladenosine
cucugccauguugcuauugca

SEQ ID NO: 5465 - RNA, 21 nt, Artificial Sequence
  siRNA sense strand against b2GPI
  modified_base (1)..(1): 2'-deoxy-2'-fluorouridine
  modified_base (2)..(2): cm
  misc_feature (2)..(3): 5'-phosphonothioate
  modified_base (3)..(3): 2'-deoxy-2'-fluorouridine
  modified_base (4)..(4): gm
  modified_base (5)..(5): 2'-deoxy-2'-fluorocytidine
  modified_base (6)..(6): cm
  modified_base (7)..(7): 2'-deoxy-2'-fluoroadenosine
  modified_base (8)..(8): um
  modified_base (9)..(9): 2'-deoxy-2'-fluoroguanosine
  modified_base (10)..(10): um
  modified_base (11)..(11): 2'-deoxy-2'-fluorouridine
  modified_base (12)..(12): 2'-deoxy-2'-fluoroguanosine
  modified_base (13)..(13): cm
  modified_base (14)..(14): 2'-deoxy-2'-fluorouridine
  modified_base (15)..(15): 2'-O-methyladenosine
  modified_base (16)..(16): 2'-deoxy-2'-fluorouridine
  modified_base (17)..(17): um
  modified_base (18)..(18): 2'-deoxy-2'-fluoroguanosine
  modified_base (19)..(19): cm
  modified_base (20)..(20): 2'-deoxy-2'-fluoroadenosine
  modified_base (21)..(21): gm
ucugccauguugcuauugcag

SEQ ID NO: 5466 - RNA, 21 nt, Artificial Sequence
  siRNA sense strand against b2GPI
  modified_base (1)..(1): 2'-deoxy-2'-fluorocytidine
  modified_base (2)..(2): um
  misc_feature (2)..(3): 5'-phosphonothioate
  modified_base (3)..(3): 2'-deoxy-2'-fluoroguanosine
  modified_base (4)..(4): cm
  modified_base (5)..(5): 2'-deoxy-2'-fluorocytidine
  modified_base (6)..(6): 2'-O-methyladenosine
  modified_base (7)..(7): 2'-deoxy-2'-fluorouridine
  modified_base (8)..(8): gm
  modified_base (9)..(9): 2'-deoxy-2'-fluorouridine
  modified_base (10)..(10): um
  modified_base (11)..(11): 2'-deoxy-2'-fluoroguanosine
  modified_base (12)..(12): 2'-deoxy-2'-fluorocytidine
  modified_base (13)..(13): um
  modified_base (14)..(14): 2'-deoxy-2'-fluoroadenosine
  modified_base (15)..(15): um
  modified_base (16)..(16): 2'-deoxy-2'-fluorouridine
  modified_base (17)..(17): gm
  modified_base (18)..(18): 2'-deoxy-2'-fluorocytidine
  modified_base (19)..(19): 2'-O-methyladenosine
  modified_base (20)..(20): 2'-deoxy-2'-fluoroguanosine
  modified_base (21)..(21): gm
cugccauguugcuauugcagg

SEQ ID NO: 5467 - RNA, 21 nt, Artificial Sequence
  siRNA sense strand against b2GPI
  modified_base (1)..(1): 2'-deoxy-2'-fluorouridine
  modified_base (2)..(2): gm
  misc_feature (2)..(3): 5'-phosphonothioate
  modified_base (3)..(3): 2'-deoxy-2'-fluorocytidine
  modified_base (4)..(4): cm
  modified_base (5)..(5): 2'-deoxy-2'-fluoroadenosine
  modified_base (6)..(6): um
  modified_base (7)..(7): 2'-deoxy-2'-fluoroguanosine
  modified_base (8)..(8): um
  modified_base (9)..(9): 2'-deoxy-2'-fluorouridine
  modified_base (10)..(10): gm
  modified_base (11)..(11): 2'-deoxy-2'-fluorocytidine
  modified_base (12)..(12): 2'-deoxy-2'-fluorouridine
  modified_base (13)..(13): 2'-O-methyladenosine
  modified_base (14)..(14): 2'-deoxy-2'-fluorouridine
  modified_base (15)..(15): um
  modified_base (16)..(16): 2'-deoxy-2'-fluoroguanosine
  modified_base (17)..(17): cm
  modified_base (18)..(18): 2'-deoxy-2'-fluoroadenosine
  modified_base (19)..(19): gm
  modified_base (20)..(20): 2'-deoxy-2'-fluoroguanosine
  modified_base (21)..(21): 2'-O-methyladenosine
ugccauguugcuauugcagga

SEQ ID NO: 5468 - RNA, 21 nt, Artificial Sequence
  siRNA sense strand against b2GPI
  modified_base (1)..(1): 2'-deoxy-2'-fluoroadenosine
  modified_base (2)..(2): um
  misc_feature (2)..(3): 5'-phosphonothioate
  modified_base (3)..(3): 2'-deoxy-2'-fluoroguanosine
  modified_base (4)..(4): um
  modified_base (5)..(5): 2'-deoxy-2'-fluorouridine
  modified_base (6)..(6): gm
  modified_base (7)..(7): 2'-deoxy-2'-fluorocytidine
  modified_base (8)..(8): um
  modified_base (9)..(9): 2'-deoxy-2'-fluoroadenosine
  modified_base (10)..(10): um
  modified_base (11)..(11): 2'-deoxy-2'-fluorouridine
  modified_base (12)..(12): 2'-deoxy-2'-fluoroguanosine
  modified_base (13)..(13): cm
  modified_base (14)..(14): 2'-deoxy-2'-fluoroadenosine
  modified_base (15)..(15): gm
  modified_base (16)..(16): 2'-deoxy-2'-fluoroguanosine
  modified_base (17)..(17): 2'-O-methyladenosine
  modified_base (18)..(18): 2'-deoxy-2'-fluorocytidine
  modified_base (19)..(19): gm
  modified_base (20)..(20): 2'-deoxy-2'-fluoroguanosine
  modified_base (21)..(21): 2'-O-methyladenosine
auguugcuauugcaggacgga

SEQ ID NO: 5469 - RNA, 21 nt, Artificial Sequence
  siRNA sense strand against b2GPI
  modified_base (1)..(1): 2'-deoxy-2'-fluorouridine
  modified_base (2)..(2): um
  misc_feature (2)..(3): 5'-phosphonothioate
  modified_base (3)..(3): 2'-deoxy-2'-fluoroguanosine
  modified_base (4)..(4): cm
  modified_base (5)..(5): 2'-deoxy-2'-fluorouridine
  modified_base (6)..(6): 2'-O-methyladenosine
  modified_base (7)..(7): 2'-deoxy-2'-fluorouridine
  modified_base (8)..(8): um
  modified_base (9)..(9): 2'-deoxy-2'-fluoroguanosine
  modified_base (10)..(10): cm
  modified_base (11)..(11): 2'-deoxy-2'-fluoroadenosine
  modified_base (12)..(12): 2'-deoxy-2'-fluoroguanosine
  modified_base (13)..(13): gm
  modified_base (14)..(14): 2'-deoxy-2'-fluoroadenosine
  modified_base (15)..(15): cm
  modified_base (16)..(16): 2'-deoxy-2'-fluoroguanosine
  modified_base (17)..(17): gm
  modified_base (18)..(18): 2'-deoxy-2'-fluoroadenosine
  modified_base (19)..(19): cm
  modified_base (20)..(20): 2'-deoxy-2'-fluorocytidine
  modified_base (21)..(21): um
uugcuauugcaggacggaccu

SEQ ID NO: 5470 - RNA, 21 nt, Artificial Sequence
  siRNA sense strand against b2GPI
  modified_base (1)..(1): 2'-deoxy-2'-fluorouridine
  modified_base (2)..(2): gm
  misc_feature (2)..(3): 5'-phosphonothioate
  modified_base (3)..(3): 2'-deoxy-2'-fluorocytidine
  modified_base (4)..(4): um
  modified_base (5)..(5): 2'-deoxy-2'-fluoroadenosine
  modified_base (6)..(6): um
  modified_base (7)..(7): 2'-deoxy-2'-fluorouridine
  modified_base (8)..(8): gm
  modified_base (9)..(9): 2'-deoxy-2'-fluorocytidine
  modified_base (10)..(10): 2'-O-methyladenosine
  modified_base (11)..(11): 2'-deoxy-2'-fluoroguanosine
  modified_base (12)..(12): 2'-deoxy-2'-fluoroguanosine
  modified_base (13)..(13): 2'-O-methyladenosine
  modified_base (14)..(14): 2'-deoxy-2'-fluorocytidine
  modified_base (15)..(15): gm
  modified_base (16)..(16): 2'-deoxy-2'-fluoroguanosine
  modified_base (17)..(17): 2'-O-methyladenosine
  modified_base (18)..(18): 2'-deoxy-2'-fluorocytidine
  modified_base (19)..(19): cm
  modified_base (20)..(20): 2'-deoxy-2'-fluorouridine
  modified_base (21)..(21): gm
ugcuauugcaggacggaccug

SEQ ID NO: 5471 - RNA, 21 nt, Artificial Sequence
  siRNA sense strand against b2GPI
  modified_base (1)..(1): 2'-deoxy-2'-fluoroguanosine
  modified_base (2)..(2): cm
  misc_feature (2)..(3): 5'-phosphonothioate
  modified_base (3)..(3): 2'-deoxy-2'-fluorouridine
  modified_base (4)..(4): 2'-O-methyladenosine
  modified_base (5)..(5): 2'-deoxy-2'-fluorouridine
  modified_base (6)..(6): um
  modified_base (7)..(7): 2'-deoxy-2'-fluoroguanosine
  modified_base (8)..(8): cm
  modified_base (9)..(9): 2'-deoxy-2'-fluoroadenosine
  modified_base (10)..(10): gm
  modified_base (11)..(11): 2'-deoxy-2'-fluoroguanosine
  modified_base (12)..(12): 2'-deoxy-2'-fluoroadenosine
  modified_base (13)..(13): cm
  modified_base (14)..(14): 2'-deoxy-2'-fluoroguanosine
  modified_base (15)..(15): gm
  modified_base (16)..(16): 2'-deoxy-2'-fluoroadenosine
  modified_base (17)..(17): cm
  modified_base (18)..(18): 2'-deoxy-2'-fluorocytidine
  modified_base (19)..(19): um
  modified_base (20)..(20): 2'-deoxy-2'-fluoroguanosine
  modified_base (21)..(21): um
gcuauugcaggacggaccugu

SEQ ID NO: 5472 - RNA, 21 nt, Artificial Sequence
  siRNA sense strand against b2GPI
  modified_base (1)..(1): 2'-deoxy-2'-fluorocytidine
  modified_base (2)..(2): um
  misc_feature (2)..(3): 5'-phosphonothioate
  modified_base (3)..(3): 2'-deoxy-2'-fluoroadenosine
  modified_base (4)..(4): um
  modified_base (5)..(5): 2'-deoxy-2'-fluorouridine
  modified_base (6)..(6): gm
  modified_base (7)..(7): 2'-deoxy-2'-fluorocytidine
  modified_base (8)..(8): 2'-O-methyladenosine
  modified_base (9)..(9): 2'-deoxy-2'-fluoroguanosine
  modified_base (10)..(10): gm
  modified_base (11)..(11): 2'-deoxy-2'-fluoroadenosine
  modified_base (12)..(12): 2'-deoxy-2'-fluorocytidine
  modified_base (13)..(13): gm
  modified_base (14)..(14): 2'-deoxy-2'-fluoroguanosine
  modified_base (15)..(15): 2'-O-methyladenosine
  modified_base (16)..(16): 2'-deoxy-2'-fluorocytidine
  modified_base (17)..(17): cm
  modified_base (18)..(18): 2'-deoxy-2'-fluorouridine
  modified_base (19)..(19): gm
  modified_base (20)..(20): 2'-deoxy-2'-fluorouridine
  modified_base (21)..(21): cm
cuauugcaggacggaccuguc

SEQ ID NO: 5473 - RNA, 21 nt, Artificial Sequence
  siRNA sense strand against b2GPI
  modified_base (1)..(1): 2'-deoxy-2'-fluorouridine
  modified_base (2)..(2): um
  misc_feature (2)..(3): 5'-phosphonothioate
  modified_base (3)..(3): 2'-deoxy-2'-fluoroguanosine
  modified_base (4)..(4): cm
  modified_base (5)..(5): 2'-deoxy-2'-fluoroadenosine
  modified_base (6)..(6): gm
  modified_base (7)..(7): 2'-deoxy-2'-fluoroguanosine
  modified_base (8)..(8): 2'-O-methyladenosine
  modified_base (9)..(9): 2'-deoxy-2'-fluorocytidine
  modified_base (10)..(10): gm
  modified_base (11)..(11): 2'-deoxy-2'-fluoroguanosine
  modified_base (12)..(12): 2'-deoxy-2'-fluoroadenosine
  modified_base (13)..(13): cm
  modified_base (14)..(14): 2'-deoxy-2'-fluorocytidine
  modified_base (15)..(15): um
  modified_base (16)..(16): 2'-deoxy-2'-fluoroguanosine
  modified_base (17)..(17): um
  modified_base (18)..(18): 2'-deoxy-2'-fluorocytidine
  modified_base (19)..(19): cm
  modified_base (20)..(20): 2'-deoxy-2'-fluorocytidine
  modified_base (21)..(21): 2'-O-methyladenosine
uugcaggacggaccuguccca

SEQ ID NO: 5474 - RNA, 21 nt, Artificial Sequence
  siRNA sense strand against b2GPI
  modified_base (1)..(1): 2'-deoxy-2'-fluoroguanosine
  modified_base (2)..(2): cm
  misc_feature (2)..(3): 5'-phosphonothioate
  modified_base (3)..(3): 2'-deoxy-2'-fluoroadenosine
  modified_base (4)..(4): gm
  modified_base (5)..(5): 2'-deoxy-2'-fluoroguanosine
  modified_base (6)..(6): 2'-O-methyladenosine
  modified_base (7)..(7): 2'-deoxy-2'-fluorocytidine
  modified_base (8)..(8): gm
  modified_base (9)..(9): 2'-deoxy-2'-fluoroguanosine
  modified_base (10)..(10): 2'-O-methyladenosine
  modified_base (11)..(11): 2'-deoxy-2'-fluorocytidine
  modified_base (12)..(12): 2'-deoxy-2'-fluorocytidine
  modified_base (13)..(13): um
  modified_base (14)..(14): 2'-deoxy-2'-fluoroguanosine
  modified_base (15)..(15): um
  modified_base (16)..(16): 2'-deoxy-2'-fluorocytidine
  modified_base (17)..(17): cm
  modified_base (18)..(18): 2'-deoxy-2'-fluorocytidine
  modified_base (19)..(19): 2'-O-methyladenosine
  modified_base (20)..(20): 2'-deoxy-2'-fluoroadenosine
  modified_base (21)..(21): gm
gcaggacggaccugucccaag

SEQ ID NO: 5475 - RNA, 21 nt, Artificial Sequence
  siRNA sense strand against b2GPI
  modified_base (1)..(1): 2'-deoxy-2'-fluorocytidine
  modified_base (2)..(2): 2'-O-methyladenosine
  misc_feature (2)..(3): 5'-phosphonothioate
  modified_base (3)..(3): 2'-deoxy-2'-fluoroguanosine
  modified_base (4)..(4): gm
  modified_base (5)..(5): 2'-deoxy-2'-fluoroadenosine
  modified_base (6)..(6): cm
  modified_base (7)..(7): 2'-deoxy-2'-fluoroguanosine
  modified_base (8)..(8): gm
  modified_base (9)..(9): 2'-deoxy-2'-fluoroadenosine
  modified_base (10)..(10): cm
  modified_base (11)..(11): 2'-deoxy-2'-fluorocytidine
  modified_base (12)..(12): 2'-deoxy-2'-fluorouridine
  modified_base (13)..(13): gm
  modified_base (14)..(14): 2'-deoxy-2'-fluorouridine
  modified_base (15)..(15): cm
  modified_base (16)..(16): 2'-deoxy-2'-fluorocytidine
  modified_base (17)..(17): cm
  modified_base (18)..(18): 2'-deoxy-2'-fluoroadenosine
  modified_base (19)..(19): 2'-O-methyladenosine
  modified_base (20)..(20): 2'-deoxy-2'-fluoroguanosine
  modified_base (21)..(21): cm
caggacggaccugucccaagc

SEQ ID NO: 5476 - RNA, 21 nt, Artificial Sequence
  siRNA sense strand against b2GPI
  modified_base (1)..(1): 2'-deoxy-2'-fluoroguanosine
  modified_base (2)..(2): gm
  misc_feature (2)..(3): 5'-phosphonothioate
  modified_base (3)..(3): 2'-deoxy-2'-fluoroadenosine
  modified_base (4)..(4): cm
  modified_base (5)..(5): 2'-deoxy-2'-fluoroguanosine
  modified_base (6)..(6): gm
  modified_base (7)..(7): 2'-deoxy-2'-fluoroadenosine
  modified_base (8)..(8): cm
  modified_base (9)..(9): 2'-deoxy-2'-fluorocytidine
  modified_base (10)..(10): um
  modified_base (11)..(11): 2'-deoxy-2'-fluoroguanosine
  modified_base (12)..(12): 2'-deoxy-2'-fluorouridine
  modified_base (13)..(13): cm
  modified_base (14)..(14): 2'-deoxy-2'-fluorocytidine
  modified_base (15)..(15): cm
  modified_base (16)..(16): 2'-deoxy-2'-fluoroadenosine
  modified_base (17)..(17): 2'-O-methyladenosine
  modified_base (18)..(18): 2'-deoxy-2'-fluoroguanosine
  modified_base (19)..(19): cm
  modified_base (20)..(20): 2'-deoxy-2'-fluorocytidine
  modified_base (21)..(21): 2'-O-methyladenosine
ggacggaccugucccaagcca

SEQ ID NO: 5477 - RNA, 21 nt, Artificial Sequence
  siRNA sense strand against b2GPI
  modified_base (1)..(1): 2'-deoxy-2'-fluoroguanosine
  modified_base (2)..(2): 2'-O-methyladenosine
  misc_feature (2)..(3): 5'-phosphonothioate
  modified_base (3)..(3): 2'-deoxy-2'-fluorocytidine
  modified_base (4)..(4): gm
  modified_base (5)..(5): 2'-deoxy-2'-fluoroguanosine
  modified_base (6)..(6): 2'-O-methyladenosine
  modified_base (7)..(7): 2'-deoxy-2'-fluorocytidine
  modified_base (8)..(8): cm
  modified_base (9)..(9): 2'-deoxy-2'-fluorouridine
  modified_base (10)..(10): gm
  modified_base (11)..(11): 2'-deoxy-2'-fluorouridine
  modified_base (12)..(12): 2'-deoxy-2'-fluorocytidine
  modified_base (13)..(13): cm
  modified_base (14)..(14): 2'-deoxy-2'-fluorocytidine
  modified_base (15)..(15): 2'-O-methyladenosine
  modified_base (16)..(16): 2'-deoxy-2'-fluoroadenosine
  modified_base (17)..(17): gm
  modified_base (18)..(18): 2'-deoxy-2'-fluorocytidine
  modified_base (19)..(19): cm
  modified_base (20)..(20): 2'-deoxy-2'-fluoroadenosine
  modified_base (21)..(21): gm
gacggaccugucccaagccag

SEQ ID NO: 5478 - RNA, 21 nt, Artificial Sequence
  siRNA sense strand against b2GPI
  modified_base (1)..(1): 2'-deoxy-2'-fluoroadenosine
  modified_base (2)..(2): cm
  misc_feature (2)..(3): 5'-phosphonothioate
  modified_base (3)..(3): 2'-deoxy-2'-fluoroguanosine
  modified_base (4)..(4): gm
  modified_base (5)..(5): 2'-deoxy-2'-fluoroadenosine
  modified_base (6)..(6): cm
  modified_base (7)..(7): 2'-deoxy-2'-fluorocytidine
  modified_base (8)..(8): um
  modified_base (9)..(9): 2'-deoxy-2'-fluoroguanosine
  modified_base (10)..(10): um
  modified_base (11)..(11): 2'-deoxy-2'-fluorocytidine
  modified_base (12)..(12): 2'-deoxy-2'-fluorocytidine
  modified_base (13)..(13): cm
  modified_base (14)..(14): 2'-deoxy-2'-fluoroadenosine
  modified_base (15)..(15): 2'-O-methyladenosine
  modified_base (16)..(16): 2'-deoxy-2'-fluoroguanosine
  modified_base (17)..(17): cm
  modified_base (18)..(18): 2'-deoxy-2'-fluorocytidine
  modified_base (19)..(19): 2'-O-methyladenosine
  modified_base (20)..(20): 2'-deoxy-2'-fluoroguanosine
  modified_base (21)..(21): 2'-O-methyladenosine
acggaccugucccaagccaga

SEQ ID NO: 5479 - RNA, 21 nt, Artificial Sequence
  siRNA sense strand against b2GPI
  modified_base (1)..(1): 2'-deoxy-2'-fluorocytidine
  modified_base (2)..(2): gm
  misc_feature (2)..(3): 5'-phosphonothioate
  modified_base (3)..(3): 2'-deoxy-2'-fluoroguanosine
  modified_base (4)..(4): 2'-O-methyladenosine
  modified_base (5)..(5): 2'-deoxy-2'-fluorocytidine
  modified_base (6)..(6): cm
  modified_base (7)..(7): 2'-deoxy-2'-fluorouridine
  modified_base (8)..(8): gm
  modified_base (9)..(9): 2'-deoxy-2'-fluorouridine
  modified_base (10)..(10): cm
  modified_base (11)..(11): 2'-deoxy-2'-fluorocytidine
  modified_base (12)..(12): 2'-deoxy-2'-fluorocytidine
  modified_base (13)..(13): 2'-O-methyladenosine
  modified_base (14)..(14): 2'-deoxy-2'-fluoroadenosine
  modified_base (15)..(15): gm
  modified_base (16)..(16): 2'-deoxy-2'-fluorocytidine
  modified_base (17)..(17): cm
  modified_base (18)..(18): 2'-deoxy-2'-fluoroadenosine
  modified_base (19)..(19): gm
  modified_base (20)..(20): 2'-deoxy-2'-fluoroadenosine
  modified_base (21)..(21): um
cggaccugucccaagccagau

SEQ ID NO: 5480 - RNA, 21 nt, Artificial Sequence
  siRNA sense strand against b2GPI
  modified_base (1)..(1): 2'-deoxy-2'-fluoroguanosine
  modified_base (2)..(2): gm
  misc_feature (2)..(3): 5'-phosphonothioate
  modified_base (3)..(3): 2'-deoxy-2'-fluoroadenosine
  modified_base (4)..(4): cm
  modified_base (5)..(5): 2'-deoxy-2'-fluorocytidine
  modified_base (6)..(6): um
  modified_base (7)..(7): 2'-deoxy-2'-fluoroguanosine
  modified_base (8)..(8): um
  modified_base (9)..(9): 2'-deoxy-2'-fluorocytidine
  modified_base (10)..(10): cm
  modified_base (11)..(11): 2'-deoxy-2'-fluorocytidine
  modified_base (12)..(12): 2'-deoxy-2'-fluoroadenosine
  modified_base (13)..(13): 2'-O-methyladenosine
  modified_base (14)..(14): 2'-deoxy-2'-fluoroguanosine
  modified_base (15)..(15): cm
  modified_base (16)..(16): 2'-deoxy-2'-fluorocytidine
  modified_base (17)..(17): 2'-O-methyladenosine
  modified_base (18)..(18): 2'-deoxy-2'-fluoroguanosine
  modified_base (19)..(19): 2'-O-methyladenosine
  modified_base (20)..(20): 2'-deoxy-2'-fluorouridine
  modified_base (21)..(21): gm
ggaccugucccaagccagaug

SEQ ID NO: 5481 - RNA, 21 nt, Artificial Sequence
  siRNA sense strand against b2GPI
  modified_base (1)..(1): 2'-deoxy-2'-fluoroguanosine
  modified_base (2)..(2): 2'-O-methyladenosine
  misc_feature (2)..(3): 5'-phosphonothioate
  modified_base (3)..(3): 2'-deoxy-2'-fluorocytidine
  modified_base (4)..(4): cm
  modified_base (5)..(5): 2'-deoxy-2'-fluorouridine
  modified_base (6)..(6): gm
  modified_base (7)..(7): 2'-deoxy-2'-fluorouridine
  modified_base (8)..(8): cm
  modified_base (9)..(9): 2'-deoxy-2'-fluorocytidine
  modified_base (10)..(10): cm
  modified_base (11)..(11): 2'-deoxy-2'-fluoroadenosine
  modified_base (12)..(12): 2'-deoxy-2'-fluoroadenosine
  modified_base (13)..(13): gm
  modified_base (14)..(14): 2'-deoxy-2'-fluorocytidine
  modified_base (15)..(15): cm
  modified_base (16)..(16): 2'-deoxy-2'-fluoroadenosine
  modified_base (17)..(17): gm
  modified_base (18)..(18): 2'-deoxy-2'-fluoroadenosine
  modified_base (19)..(19): um
  modified_base (20)..(20): 2'-deoxy-2'-fluoroguanosine
  modified_base (21)..(21): 2'-O-methyladenosine
gaccugucccaagccagauga

SEQ ID NO: 5482 - RNA, 21 nt, Artificial Sequence
  siRNA sense strand against b2GPI
  modified_base (1)..(1): 2'-deoxy-2'-fluoroadenosine
  modified_base (2)..(2): cm
  misc_feature (2)..(3): 5'-phosphonothioate
  modified_base (3)..(3): 2'-deoxy-2'-fluorocytidine
  modified_base (4)..(4): um
  modified_base (5)..(5): 2'-deoxy-2'-fluoroguanosine
  modified_base (6)..(6): um
  modified_base (7)..(7): 2'-deoxy-2'-fluorocytidine
  modified_base (8)..(8): cm
  modified_base (9)..(9): 2'-deoxy-2'-fluorocytidine
  modified_base (10)..(10): 2'-O-methyladenosine
  modified_base (11)..(11): 2'-deoxy-2'-fluoroadenosine
  modified_base (12)..(12): 2'-deoxy-2'-fluoroguanosine
  modified_base (13)..(13): cm
  modified_base (14)..(14): 2'-deoxy-2'-fluorocytidine
  modified_base (15)..(15): 2'-O-methyladenosine
  modified_base (16)..(16): 2'-deoxy-2'-fluoroguanosine
  modified_base (17)..(17): 2'-O-methyladenosine
  modified_base (18)..(18): 2'-deoxy-2'-fluorouridine
  modified_base (19)..(19): gm
  modified_base (20)..(20): 2'-deoxy-2'-fluoroadenosine
  modified_base (21)..(21): um
accugucccaagccagaugau

SEQ ID NO: 5483 - RNA, 21 nt, Artificial Sequence
  siRNA sense strand against b2GPI
  modified_base (1)..(1): 2'-deoxy-2'-fluorocytidine
  modified_base (2)..(2): cm
  misc_feature (2)..(3): 5'-phosphonothioate
  modified_base (3)..(3): 2'-deoxy-2'-fluorouridine
  modified_base (4)..(4): gm
  modified_base (5)..(5): 2'-deoxy-2'-fluorouridine
  modified_base (6)..(6): cm
  modified_base (7)..(7): 2'-deoxy-2'-fluorocytidine
  modified_base (8)..(8): cm
  modified_base (9)..(9): 2'-deoxy-2'-fluoroadenosine
  modified_base (10)..(10): 2'-O-methyladenosine
  modified_base (11)..(11): 2'-deoxy-2'-fluoroguanosine
  modified_base (12)..(12): 2'-deoxy-2'-fluorocytidine
  modified_base (13)..(13): cm
  modified_base (14)..(14): 2'-deoxy-2'-fluoroadenosine
  modified_base (15)..(15): gm
  modified_base (16)..(16): 2'-deoxy-2'-fluoroadenosine
  modified_base (17)..(17): um
  modified_base (18)..(18): 2'-deoxy-2'-fluoroguanosine
  modified_base (19)..(19): 2'-O-methyladenosine
  modified_base (20)..(20): 2'-deoxy-2'-fluorouridine
  modified_base (21)..(21): um
ccugucccaagccagaugauu

SEQ ID NO: 5484 - RNA, 21 nt, Artificial Sequence
  siRNA sense strand against b2GPI
  modified_base (1)..(1): 2'-deoxy-2'-fluorocytidine
  modified_base (2)..(2): um
  misc_feature (2)..(3): 5'-phosphonothioate
  modified_base (3)..(3): 2'-deoxy-2'-fluoroguanosine
  modified_base (4)..(4): um
  modified_base (5)..(5): 2'-deoxy-2'-fluorocytidine
  modified_base (6)..(6): cm
  modified_base (7)..(7): 2'-deoxy-2'-fluorocytidine
  modified_base (8)..(8): 2'-O-methyladenosine
  modified_base (9)..(9): 2'-deoxy-2'-fluoroadenosine
  modified_base (10)..(10): gm
  modified_base (11)..(11): 2'-deoxy-2'-fluorocytidine
  modified_base (12)..(12): 2'-deoxy-2'-fluorocytidine
  modified_base (13)..(13): 2'-O-methyladenosine
  modified_base (14)..(14): 2'-deoxy-2'-fluoroguanosine
  modified_base (15)..(15): 2'-O-methyladenosine
  modified_base (16)..(16): 2'-deoxy-2'-fluorouridine
  modified_base (17)..(17): gm
  modified_base (18)..(18): 2'-deoxy-2'-fluoroadenosine
  modified_base (19)..(19): um
  modified_base (20)..(20): 2'-deoxy-2'-fluorouridine
  modified_base (21)..(21): um
cugucccaagccagaugauuu

SEQ ID NO: 5485 - RNA, 21 nt, Artificial Sequence
  siRNA sense strand against b2GPI
  modified_base (1)..(1): 2'-deoxy-2'-fluorouridine
  modified_base (2)..(2): gm
  misc_feature (2)..(3): 5'-phosphonothioate
  modified_base (3)..(3): 2'-deoxy-2'-fluorouridine
  modified_base (4)..(4): cm
  modified_base (5)..(5): 2'-deoxy-2'-fluorocytidine
  modified_base (6)..(6): cm
  modified_base (7)..(7): 2'-deoxy-2'-fluoroadenosine
  modified_base (8)..(8): 2'-O-methyladenosine
  modified_base (9)..(9): 2'-deoxy-2'-fluoroguanosine
  modified_base (10)..(10): cm
  modified_base (11)..(11): 2'-deoxy-2'-fluorocytidine
  modified_base (12)..(12): 2'-deoxy-2'-fluoroadenosine
  modified_base (13)..(13): gm
  modified_base (14)..(14): 2'-deoxy-2'-fluoroadenosine
  modified_base (15)..(15): um
  modified_base (16)..(16): 2'-deoxy-2'-fluoroguanosine
  modified_base (17)..(17): 2'-O-methyladenosine
  modified_base (18)..(18): 2'-deoxy-2'-fluorouridine
  modified_base (19)..(19): um
  modified_base (20)..(20): 2'-deoxy-2'-fluorouridine
  modified_base (21)..(21): 2'-O-methyladenosine
ugucccaagccagaugauuua

SEQ ID NO: 5486 - RNA, 21 nt, Artificial Sequence
  siRNA sense strand against b2GPI
  modified_base (1)..(1): 2'-deoxy-2'-fluoroguanosine
  modified_base (2)..(2): um
  misc_feature (2)..(3): 5'-phosphonothioate
  modified_base (3)..(3): 2'-deoxy-2'-fluorocytidine
  modified_base (4)..(4): cm
  modified_base (5)..(5): 2'-deoxy-2'-fluorocytidine
  modified_base (6)..(6): 2'-O-methyladenosine
  modified_base (7)..(7): 2'-deoxy-2'-fluoroadenosine
  modified_base (8)..(8): gm
  modified_base (9)..(9): 2'-deoxy-2'-fluorocytidine
  modified_base (10)..(10): cm
  modified_base (11)..(11): 2'-deoxy-2'-fluoroadenosine
  modified_base (12)..(12): 2'-deoxy-2'-fluoroguanosine
  modified_base (13)..(13): 2'-O-methyladenosine
  modified_base (14)..(14): 2'-deoxy-2'-fluorouridine
  modified_base (15)..(15): gm
  modified_base (16)..(16): 2'-deoxy-2'-fluoroadenosine
  modified_base (17)..(17): um
  modified_base (18)..(18): 2'-deoxy-2'-fluorouridine
  modified_base (19)..(19): um
  modified_base (20)..(20): 2'-deoxy-2'-fluoroadenosine
  modified_base (21)..(21): cm
gucccaagccagaugauuuac

SEQ ID NO: 5487 - RNA, 21 nt, Artificial Sequence
  siRNA sense strand against b2GPI
  modified_base (1)..(1): 2'-deoxy-2'-fluorouridine
  modified_base (2)..(2): cm
  misc_feature (2)..(3): 5'-phosphonothioate
  modified_base (3)..(3): 2'-deoxy-2'-fluorocytidine
  modified_base (4)..(4): cm
  modified_base (5)..(5): 2'-deoxy-2'-fluoroadenosine
  modified_base (6)..(6): 2'-O-methyladenosine
  modified_base (7)..(7): 2'-deoxy-2'-fluoroguanosine
  modified_base (8)..(8): cm
  modified_base (9)..(9): 2'-deoxy-2'-fluorocytidine
  modified_base (10)..(10): 2'-O-methyladenosine
  modified_base (11)..(11): 2'-deoxy-2'-fluoroguanosine
  modified_base (12)..(12): 2'-deoxy-2'-fluoroadenosine
  modified_base (13)..(13): um
  modified_base (14)..(14): 2'-deoxy-2'-fluoroguanosine
  modified_base (15)..(15): 2'-O-methyladenosine
  modified_base (16)..(16): 2'-deoxy-2'-fluorouridine
  modified_base (17)..(17): um
  modified_base (18)..(18): 2'-deoxy-2'-fluorouridine
  modified_base (19)..(19): 2'-O-methyladenosine
  modified_base (20)..(20): 2'-deoxy-2'-fluorocytidine
  modified_base (21)..(21): cm
ucccaagccagaugauuuacc

SEQ ID NO: 5488 - RNA, 21 nt, Artificial Sequence
  siRNA sense strand against b2GPI
  modified_base (1)..(1): 2'-deoxy-2'-fluorocytidine
  modified_base (2)..(2): cm
  misc_feature (2)..(3): 5'-phosphonothioate
  modified_base (3)..(3): 2'-deoxy-2'-fluorocytidine
  modified_base (4)..(4): 2'-O-methyladenosine
  modified_base (5)..(5): 2'-deoxy-2'-fluoroadenosine
  modified_base (6)..(6): gm
  modified_base (7)..(7): 2'-deoxy-2'-fluorocytidine
  modified_base (8)..(8): cm
  modified_base (9)..(9): 2'-deoxy-2'-fluoroadenosine
  modified_base (10)..(10): gm
  modified_base (11)..(11): 2'-deoxy-2'-fluoroadenosine
  modified_base (12)..(12): 2'-deoxy-2'-fluorouridine
  modified_base (13)..(13): gm
  modified_base (14)..(14): 2'-deoxy-2'-fluoroadenosine
  modified_base (15)..(15): um
  modified_base (16)..(16): 2'-deoxy-2'-fluorouridine
  modified_base (17)..(17): um
  modified_base (18)..(18): 2'-deoxy-2'-fluoroadenosine
  modified_base (19)..(19): cm
  modified_base (20)..(20): 2'-deoxy-2'-fluorocytidine
  modified_base (21)..(21): 2'-O-methyladenosine
cccaagccagaugauuuacca

SEQ ID NO: 5489 - RNA, 21 nt, Artificial Sequence
  siRNA sense strand against b2GPI
  modified_base (1)..(1): 2'-deoxy-2'-fluorocytidine
  modified_base (2)..(2): cm
  misc_feature (2)..(3): 5'-phosphonothioate
  modified_base (3)..(3): 2'-deoxy-2'-fluoroadenosine
  modified_base (4)..(4): 2'-O-methyladenosine
  modified_base (5)..(5): 2'-deoxy-2'-fluoroguanosine
  modified_base (6)..(6): cm
  modified_base (7)..(7): 2'-deoxy-2'-fluorocytidine
  modified_base (8)..(8): 2'-O-methyladenosine
  modified_base (9)..(9): 2'-deoxy-2'-fluoroguanosine
  modified_base (10)..(10): 2'-O-methyladenosine
  modified_base (11)..(11): 2'-deoxy-2'-fluorouridine
  modified_base (12)..(12): 2'-deoxy-2'-fluoroguanosine
  modified_base (13)..(13): 2'-O-methyladenosine
  modified_base (14)..(14): 2'-deoxy-2'-fluorouridine
  modified_base (15)..(15): um
  modified_base (16)..(16): 2'-deoxy-2'-fluorouridine
  modified_base (17)..(17): 2'-O-methyladenosine
  modified_base (18)..(18): 2'-deoxy-2'-fluorocytidine
  modified_base (19)..(19): cm
  modified_base (20)..(20): 2'-deoxy-2'-fluoroadenosine
  modified_base (21)..(21): um
ccaagccagaugauuuaccau

SEQ ID NO: 5490 - RNA, 21 nt, Artificial Sequence
  siRNA sense strand against b2GPI
  modified_base (1)..(1): 2'-deoxy-2'-fluorocytidine
  modified_base (2)..(2): 2'-O-methyladenosine
  misc_feature (2)..(3): 5'-phosphonothioate
  modified_base (3)..(3): 2'-deoxy-2'-fluoroadenosine
  modified_base (4)..(4): gm
  modified_base (5)..(5): 2'-deoxy-2'-fluorocytidine
  modified_base (6)..(6): cm
  modified_base (7)..(7): 2'-deoxy-2'-fluoroadenosine
  modified_base (8)..(8): gm
  modified_base (9)..(9): 2'-deoxy-2'-fluoroadenosine
  modified_base (10)..(10): um
  modified_base (11)..(11): 2'-deoxy-2'-fluoroguanosine
  modified_base (12)..(12): 2'-deoxy-2'-fluoroadenosine
  modified_base (13)..(13): um
  modified_base (14)..(14): 2'-deoxy-2'-fluorouridine
  modified_base (15)..(15): um
  modified_base (16)..(16): 2'-deoxy-2'-fluoroadenosine
  modified_base (17)..(17): cm
  modified_base (18)..(18): 2'-deoxy-2'-fluorocytidine
  modified_base (19)..(19): 2'-O-methyladenosine
  modified_base (20)..(20): 2'-deoxy-2'-fluorouridine
  modified_base (21)..(21): um
caagccagaugauuuaccauu

SEQ ID NO: 5491 - RNA, 21 nt, Artificial Sequence
  siRNA sense strand against b2GPI
  modified_base (1)..(1): 2'-deoxy-2'-fluoroadenosine
  modified_base (2)..(2): 2'-O-methyladenosine
  misc_feature (2)..(3): 5'-phosphonothioate
  modified_base (3)..(3): 2'-deoxy-2'-fluoroguanosine
  modified_base (4)..(4): cm
  modified_base (5)..(5): 2'-deoxy-2'-fluorocytidine
  modified_base (6)..(6): 2'-O-methyladenosine
  modified_base (7)..(7): 2'-deoxy-2'-fluoroguanosine
  modified_base (8)..(8): 2'-O-methyladenosine
  modified_base (9)..(9): 2'-deoxy-2'-fluorouridine
  modified_base (10)..(10): gm
  modified_base (11)..(11): 2'-deoxy-2'-fluoroadenosine
  modified_base (12)..(12): 2'-deoxy-2'-fluorouridine
  modified_base (13)..(13): um
  modified_base (14)..(14): 2'-deoxy-2'-fluorouridine
  modified_base (15)..(15): 2'-O-methyladenosine
  modified_base (16)..(16): 2'-deoxy-2'-fluorocytidine
  modified_base (17)..(17): cm
  modified_base (18)..(18): 2'-deoxy-2'-fluoroadenosine
  modified_base (19)..(19): um
  modified_base (20)..(20): 2'-deoxy-2'-fluorouridine
  modified_base (21)..(21): um
aagccagaugauuuaccauuu

SEQ ID NO: 5492 - RNA, 21 nt, Artificial Sequence
  siRNA sense strand against b2GPI
  modified_base (1)..(1): 2'-deoxy-2'-fluoroadenosine
  modified_base (2)..(2): gm
  misc_feature (2)..(3): 5'-phosphonothioate
  modified_base (3)..(3): 2'-deoxy-2'-fluorocytidine
  modified_base (4)..(4): cm
  modified_base (5)..(5): 2'-deoxy-2'-fluoroadenosine
  modified_base (6)..(6): gm
  modified_base (7)..(7): 2'-deoxy-2'-fluoroadenosine
  modified_base (8)..(8): um
  modified_base (9)..(9): 2'-deoxy-2'-fluoroguanosine
  modified_base (10)..(10): 2'-O-methyladenosine
  modified_base (11)..(11): 2'-deoxy-2'-fluorouridine
  modified_base (12)..(12): 2'-deoxy-2'-fluorouridine
  modified_base (13)..(13): um
  modified_base (14)..(14): 2'-deoxy-2'-fluoroadenosine
  modified_base (15)..(15): cm
  modified_base (16)..(16): 2'-deoxy-2'-fluorocytidine
  modified_base (17)..(17): 2'-O-methyladenosine
  modified_base (18)..(18): 2'-deoxy-2'-fluorouridine
  modified_base (19)..(19): um
  modified_base (20)..(20): 2'-deoxy-2'-fluorouridine
  modified_base (21)..(21): um
agccagaugauuuaccauuuu

SEQ ID NO: 5493 - RNA, 21 nt, Artificial Sequence
  siRNA sense strand against b2GPI
  modified_base (1)..(1): 2'-deoxy-2'-fluoroguanosine
  modified_base (2)..(2): cm
  misc_feature (2)..(3): 5'-phosphonothioate
  modified_base (3)..(3): 2'-deoxy-2'-fluorocytidine
  modified_base (4)..(4): 2'-O-methyladenosine
  modified_base (5)..(5): 2'-deoxy-2'-fluoroguanosine
  modified_base (6)..(6): 2'-O-methyladenosine
  modified_base (7)..(7): 2'-deoxy-2'-fluorouridine
  modified_base (8)..(8): gm
  modified_base (9)..(9): 2'-deoxy-2'-fluoroadenosine
  modified_base (10)..(10): um
  modified_base (11)..(11): 2'-deoxy-2'-fluorouridine
  modified_base (12)..(12): 2'-deoxy-2'-fluorouridine
  modified_base (13)..(13): 2'-O-methyladenosine
  modified_base (14)..(14): 2'-deoxy-2'-fluorocytidine
  modified_base (15)..(15): cm
  modified_base (16)..(16): 2'-deoxy-2'-fluoroadenosine
  modified_base (17)..(17): um
  modified_base (18)..(18): 2'-deoxy-2'-fluorouridine
  modified_base (19)..(19): um
  modified_base (20)..(20): 2'-deoxy-2'-fluorouridine
  modified_base (21)..(21): cm
gccagaugauuuaccauuuuc

SEQ ID NO: 5494 - RNA, 21 nt, Artificial Sequence
  siRNA sense strand against b2GPI
  modified_base (1)..(1): 2'-deoxy-2'-fluorocytidine
  modified_base (2)..(2): cm
  misc_feature (2)..(3): 5'-phosphonothioate
  modified_base (3)..(3): 2'-deoxy-2'-fluoroadenosine
  modified_base (4)..(4): gm
  modified_base (5)..(5): 2'-deoxy-2'-fluoroadenosine
  modified_base (6)..(6): um
  modified_base (7)..(7): 2'-deoxy-2'-fluoroguanosine
  modified_base (8)..(8): 2'-O-methyladenosine
  modified_base (9)..(9): 2'-deoxy-2'-fluorouridine
  modified_base (10)..(10): um
  modified_base (11)..(11): 2'-deoxy-2'-fluorouridine
  modified_base (12)..(12): 2'-deoxy-2'-fluoroadenosine
  modified_base (13)..(13): cm
  modified_base (14)..(14): 2'-deoxy-2'-fluorocytidine
  modified_base (15)..(15): 2'-O-methyladenosine
  modified_base (16)..(16): 2'-deoxy-2'-fluorouridine
  modified_base (17)..(17): um
  modified_base (18)..(18): 2'-deoxy-2'-fluorouridine
  modified_base (19)..(19): um
  modified_base (20)..(20): 2'-deoxy-2'-fluorocytidine
  modified_base (21)..(21): cm
ccagaugauuuaccauuuucc

SEQ ID NO: 5495 - RNA, 21 nt, Artificial Sequence
  siRNA sense strand against b2GPI
  modified_base (1)..(1): 2'-deoxy-2'-fluorocytidine
  modified_base (2)..(2): 2'-O-methyladenosine
  misc_feature (2)..(3): 5'-phosphonothioate
  modified_base (3)..(3): 2'-deoxy-2'-fluoroguanosine
  modified_base (4)..(4): 2'-O-methyladenosine
  modified_base (5)..(5): 2'-deoxy-2'-fluorouridine
  modified_base (6)..(6): gm
  modified_base (7)..(7): 2'-deoxy-2'-fluoroadenosine
  modified_base (8)..(8): um
  modified_base (9)..(9): 2'-deoxy-2'-fluorouridine
  modified_base (10)..(10): um
  modified_base (11)..(11): 2'-deoxy-2'-fluoroadenosine
  modified_base (12)..(12): 2'-deoxy-2'-fluorocytidine
  modified_base (13)..(13): cm
  modified_base (14)..(14): 2'-deoxy-2'-fluoroadenosine
  modified_base (15)..(15): um
  modified_base (16)..(16): 2'-deoxy-2'-fluorouridine
  modified_base (17)..(17): um
  modified_base (18)..(18): 2'-deoxy-2'-fluorouridine
  modified_base (19)..(19): cm
  modified_base (20)..(20): 2'-deoxy-2'-fluorocytidine
  modified_base (21)..(21): 2'-O-methyladenosine
cagaugauuuaccauuuucca

SEQ ID NO: 5496 - RNA, 21 nt, Artificial Sequence
  siRNA sense strand against b2GPI
  modified_base (1)..(1): 2'-deoxy-2'-fluoroadenosine
  modified_base (2)..(2): gm
  misc_feature (2)..(3): 5'-phosphonothioate
  modified_base (3)..(3): 2'-deoxy-2'-fluoroadenosine
  modified_base (4)..(4): um
  modified_base (5)..(5): 2'-deoxy-2'-fluoroguanosine
  modified_base (6)..(6): 2'-O-methyladenosine
  modified_base (7)..(7): 2'-deoxy-2'-fluorouridine
  modified_base (8)..(8): um
  modified_base (9)..(9): 2'-deoxy-2'-fluorouridine
  modified_base (10)..(10): 2'-O-methyladenosine
  modified_base (11)..(11): 2'-deoxy-2'-fluorocytidine
  modified_base (12)..(12): 2'-deoxy-2'-fluorocytidine
  modified_base (13)..(13): 2'-O-methyladenosine
  modified_base (14)..(14): 2'-deoxy-2'-fluorouridine
  modified_base (15)..(15): um
  modified_base (16)..(16): 2'-deoxy-2'-fluorouridine
  modified_base (17)..(17): um
  modified_base (18)..(18): 2'-deoxy-2'-fluorocytidine
  modified_base (19)..(19): cm
  modified_base (20)..(20): 2'-deoxy-2'-fluoroadenosine
  modified_base (21)..(21): cm
agaugauuuaccauuuuccac

SEQ ID NO: 5497 - RNA, 21 nt, Artificial Sequence
  siRNA sense strand against b2GPI
  modified_base (1)..(1): 2'-deoxy-2'-fluoroguanosine
  modified_base (2)..(2): 2'-O-methyladenosine
  misc_feature (2)..(3): 5'-phosphonothioate
  modified_base (3)..(3): 2'-deoxy-2'-fluorouridine
  modified_base (4)..(4): gm
  modified_base (5)..(5): 2'-deoxy-2'-fluoroadenosine
  modified_base (6)..(6): um
  modified_base (7)..(7): 2'-deoxy-2'-fluorouridine
  modified_base (8)..(8): um
  modified_base (9)..(9): 2'-deoxy-2'-fluoroadenosine
  modified_base (10)..(10): cm
  modified_base (11)..(11): 2'-deoxy-2'-fluorocytidine
  modified_base (12)..(12): 2'-deoxy-2'-fluoroadenosine
  modified_base (13)..(13): um
  modified_base (14)..(14): 2'-deoxy-2'-fluorouridine
  modified_base (15)..(15): um
  modified_base (16)..(16): 2'-deoxy-2'-fluorouridine
  modified_base (17)..(17): cm
  modified_base (18)..(18): 2'-deoxy-2'-fluorocytidine
  modified_base (19)..(19): 2'-O-methyladenosine
  modified_base (20)..(20): 2'-deoxy-2'-fluorocytidine
  modified_base (21)..(21): 2'-O-methyladenosine
gaugauuuaccauuuuccaca

SEQ ID NO: 5498 - RNA, 21 nt, Artificial Sequence
  siRNA sense strand against b2GPI
  modified_base (1)..(1): 2'-deoxy-2'-fluoroadenosine
  modified_base (2)..(2): um
  misc_feature (2)..(3): 5'-phosphonothioate
  modified_base (3)..(3): 2'-deoxy-2'-fluoroguanosine
  modified_base (4)..(4): 2'-O-methyladenosine
  modified_base (5)..(5): 2'-deoxy-2'-fluorouridine
  modified_base (6)..(6): um
  modified_base (7)..(7): 2'-deoxy-2'-fluorouridine
  modified_base (8)..(8): 2'-O-methyladenosine
  modified_base (9)..(9): 2'-deoxy-2'-fluorocytidine
  modified_base (10)..(10): cm
  modified_base (11)..(11): 2'-deoxy-2'-fluoroadenosine
  modified_base (12)..(12): 2'-deoxy-2'-fluorouridine
  modified_base (13)..(13): um
  modified_base (14)..(14): 2'-deoxy-2'-fluorouridine
  modified_base (15)..(15): um
  modified_base (16)..(16): 2'-deoxy-2'-fluorocytidine
  modified_base (17)..(17): cm
  modified_base (18)..(18): 2'-deoxy-2'-fluoroadenosine
  modified_base (19)..(19): cm
  modified_base (20)..(20): 2'-deoxy-2'-fluoroadenosine
  modified_base (21)..(21): gm
augauuuaccauuuuccacag

SEQ ID NO: 5499 - RNA, 21 nt, Artificial Sequence
  siRNA sense strand against b2GPI
  modified_base (1)..(1): 2'-deoxy-2'-fluorouridine
  modified_base (2)..(2): um
  misc_feature (2)..(3): 5'-phosphonothioate
  modified_base (3)..(3): 2'-deoxy-2'-fluorouridine
  modified_base (4)..(4): 2'-O-methyladenosine
  modified_base (5)..(5): 2'-deoxy-2'-fluorocytidine
  modified_base (6)..(6): cm
  modified_base (7)..(7): 2'-deoxy-2'-fluoroadenosine
  modified_base (8)..(8): um
  modified_base (9)..(9): 2'-deoxy-2'-fluorouridine
  modified_base (10)..(10): um
  modified_base (11)..(11): 2'-deoxy-2'-fluorouridine
  modified_base (12)..(12): 2'-deoxy-2'-fluorocytidine
  modified_base (13)..(13): cm
  modified_base (14)..(14): 2'-deoxy-2'-fluoroadenosine
  modified_base (15)..(15): cm
  modified_base (16)..(16): 2'-deoxy-2'-fluoroadenosine
  modified_base (17)..(17): gm
  modified_base (18)..(18): 2'-deoxy-2'-fluorouridine
  modified_base (19)..(19): gm
  modified_base (20)..(20): 2'-deoxy-2'-fluoroguanosine
  modified_base (21)..(21): um
uuuaccauuuuccacaguggu

SEQ ID NO: 5500 - RNA, 21 nt, Artificial Sequence
  siRNA sense strand against b2GPI
  modified_base (1)..(1): 2'-deoxy-2'-fluorouridine
  modified_base (2)..(2): um
  misc_feature (2)..(3): 5'-phosphonothioate
  modified_base (3)..(3): 2'-deoxy-2'-fluoroadenosine
  modified_base (4)..(4): cm
  modified_base (5)..(5): 2'-deoxy-2'-fluorocytidine
  modified_base (6)..(6): 2'-O-methyladenosine
  modified_base (7)..(7): 2'-deoxy-2'-fluorouridine
  modified_base (8)..(8): um
  modified_base (9)..(9): 2'-deoxy-2'-fluorouridine
  modified_base (10)..(10): um
  modified_base (11)..(11): 2'-deoxy-2'-fluorocytidine
  modified_base (12)..(12): 2'-deoxy-2'-fluorocytidine
  modified_base (13)..(13): 2'-O-methyladenosine
  modified_base (14)..(14): 2'-deoxy-2'-fluorocytidine
  modified_base (15)..(15): 2'-O-methyladenosine
  modified_base (16)..(16): 2'-deoxy-2'-fluoroguanosine
  modified_base (17)..(17): um
  modified_base (18)..(18): 2'-deoxy-2'-fluoroguanosine
  modified_base (19)..(19): gm
  modified_base (20)..(20): 2'-deoxy-2'-fluorouridine
  modified_base (21)..(21): cm
uuaccauuuuccacagugguc

SEQ ID NO: 5501 - RNA, 21 nt, Artificial Sequence
  siRNA sense strand against b2GPI
  modified_base (1)..(1): 2'-deoxy-2'-fluorouridine
  modified_base (2)..(2): 2'-O-methyladenosine
  misc_feature (2)..(3): 5'-phosphonothioate
  modified_base (3)..(3): 2'-deoxy-2'-fluorocytidine
  modified_base (4)..(4): cm
  modified_base (5)..(5): 2'-deoxy-2'-fluoroadenosine
  modified_base (6)..(6): um
  modified_base (7)..(7): 2'-deoxy-2'-fluorouridine
  modified_base (8)..(8): um
  modified_base (9)..(9): 2'-deoxy-2'-fluorouridine
  modified_base (10)..(10): cm
  modified_base (11)..(11): 2'-deoxy-2'-fluorocytidine
  modified_base (12)..(12): 2'-deoxy-2'-fluoroadenosine
  modified_base (13)..(13): cm
  modified_base (14)..(14): 2'-deoxy-2'-fluoroadenosine
  modified_base (15)..(15): gm
  modified_base (16)..(16): 2'-deoxy-2'-fluorouridine
  modified_base (17)..(17): gm
  modified_base (18)..(18): 2'-deoxy-2'-fluoroguanosine
  modified_base (19)..(19): um
  modified_base (20)..(20): 2'-deoxy-2'-fluorocytidine
  modified_base (21)..(21): cm
uaccauuuuccacaguggucc

SEQ ID NO: 5502 - RNA, 21 nt, Artificial Sequence
  siRNA sense strand against b2GPI
  modified_base (1)..(1): 2'-deoxy-2'-fluoroadenosine
  modified_base (2)..(2): um
  misc_feature (2)..(3): 5'-phosphonothioate
  modified_base (3)..(3): 2'-deoxy-2'-fluorouridine
  modified_base (4)..(4): um
  modified_base (5)..(5): 2'-deoxy-2'-fluorouridine
  modified_base (6)..(6): cm
  modified_base (7)..(7): 2'-deoxy-2'-fluorocytidine
  modified_base (8)..(8): 2'-O-methyladenosine
  modified_base (9)..(9): 2'-deoxy-2'-fluorocytidine
  modified_base (10)..(10): 2'-O-methyladenosine
  modified_base (11)..(11): 2'-deoxy-2'-fluoroguanosine
  modified_base (12)..(12): 2'-deoxy-2'-fluorouridine
  modified_base (13)..(13): gm
  modified_base (14)..(14): 2'-deoxy-2'-fluoroguanosine
  modified_base (15)..(15): um
  modified_base (16)..(16): 2'-deoxy-2'-fluorocytidine
  modified_base (17)..(17): cm
  modified_base (18)..(18): 2'-deoxy-2'-fluorocytidine
  modified_base (19)..(19): gm
  modified_base (20)..(20): 2'-deoxy-2'-fluorouridine
  modified_base (21)..(21): um
auuuuccacaguggucccguu

SEQ ID NO: 5503 - RNA, 21 nt, Artificial Sequence
  siRNA sense strand against b2GPI
  modified_base (1)..(1): 2'-deoxy-2'-fluorouridine
  modified_base (2)..(2): um
  misc_feature (2)..(3): 5'-phosphonothioate
  modified_base (3)..(3): 2'-deoxy-2'-fluorouridine
  modified_base (4)..(4): um
  modified_base (5)..(5): 2'-deoxy-2'-fluorocytidine
  modified_base (6)..(6): cm
  modified_base (7)..(7): 2'-deoxy-2'-fluoroadenosine
  modified_base (8)..(8): cm
  modified_base (9)..(9): 2'-deoxy-2'-fluoroadenosine
  modified_base (10)..(10): gm
  modified_base (11)..(11): 2'-deoxy-2'-fluorouridine
  modified_base (12)..(12): 2'-deoxy-2'-fluoroguanosine
  modified_base (13)..(13): gm
  modified_base (14)..(14): 2'-deoxy-2'-fluorouridine
  modified_base (15)..(15): cm
  modified_base (16)..(16): 2'-deoxy-2'-fluorocytidine
  modified_base (17)..(17): cm
  modified_base (18)..(18): 2'-deoxy-2'-fluoroguanosine
  modified_base (19)..(19): um
  modified_base (20)..(20): 2'-deoxy-2'-fluorouridine
  modified_base (21)..(21): 2'-O-methyladenosine
uuuuccacaguggucccguua

SEQ ID NO: 5504 - RNA, 21 nt, Artificial Sequence
  siRNA sense strand against b2GPI
  modified_base (1)..(1): 2'-deoxy-2'-fluorouridine
  modified_base (2)..(2): um
  misc_feature (2)..(3): 5'-phosphonothioate
  modified_base (3)..(3): 2'-deoxy-2'-fluorouridine
  modified_base (4)..(4): cm
  modified_base (5)..(5): 2'-deoxy-2'-fluorocytidine
  modified_base (6)..(6): 2'-O-methyladenosine
  modified_base (7)..(7): 2'-deoxy-2'-fluorocytidine
  modified_base (8)..(8): 2'-O-methyladenosine
  modified_base (9)..(9): 2'-deoxy-2'-fluoroguanosine
  modified_base (10)..(10): um
  modified_base (11)..(11): 2'-deoxy-2'-fluoroguanosine
  modified_base (12)..(12): 2'-deoxy-2'-fluoroguanosine
  modified_base (13)..(13): um
  modified_base (14)..(14): 2'-deoxy-2'-fluorocytidine
  modified_base (15)..(15): cm
  modified_base (16)..(16): 2'-deoxy-2'-fluorocytidine
  modified_base (17)..(17): gm
  modified_base (18)..(18): 2'-deoxy-2'-fluorouridine
  modified_base (19)..(19): um
  modified_base (20)..(20): 2'-deoxy-2'-fluoroadenosine
  modified_base (21)..(21): 2'-O-methyladenosine
uuuccacaguggucccguuaa

SEQ ID NO: 5505 - RNA, 21 nt, Artificial Sequence
  siRNA sense strand against b2GPI
  modified_base (1)..(1): 2'-deoxy-2'-fluorouridine
  modified_base (2)..(2): um
  misc_feature (2)..(3): 5'-phosphonothioate
  modified_base (3)..(3): 2'-deoxy-2'-fluorocytidine
  modified_base (4)..(4): cm
  modified_base (5)..(5): 2'-deoxy-2'-fluoroadenosine
  modified_base (6)..(6): cm
  modified_base (7)..(7): 2'-deoxy-2'-fluoroadenosine
  modified_base (8)..(8): gm
  modified_base (9)..(9): 2'-deoxy-2'-fluorouridine
  modified_base (10)..(10): gm
  modified_base (11)..(11): 2'-deoxy-2'-fluoroguanosine
  modified_base (12)..(12): 2'-deoxy-2'-fluorouridine
  modified_base (13)..(13): cm
  modified_base (14)..(14): 2'-deoxy-2'-fluorocytidine
  modified_base (15)..(15): cm
  modified_base (16)..(16): 2'-deoxy-2'-fluoroguanosine
  modified_base (17)..(17): um
  modified_base (18)..(18): 2'-deoxy-2'-fluorouridine
  modified_base (19)..(19): 2'-O-methyladenosine
  modified_base (20)..(20): 2'-deoxy-2'-fluoroadenosine
  modified_base (21)..(21): 2'-O-methyladenosine
uuccacaguggucccguuaaa

SEQ ID NO: 5506 - RNA, 21 nt, Artificial Sequence
  siRNA sense strand against b2GPI
  modified_base (1)..(1): 2'-deoxy-2'-fluorouridine
  modified_base (2)..(2): cm
  misc_feature (2)..(3): 5'-phosphonothioate
  modified_base (3)..(3): 2'-deoxy-2'-fluorocytidine
  modified_base (4)..(4): 2'-O-methyladenosine
  modified_base (5)..(5): 2'-deoxy-2'-fluorocytidine
  modified_base (6)..(6): 2'-O-methyladenosine
  modified_base (7)..(7): 2'-deoxy-2'-fluoroguanosine
  modified_base (8)..(8): um
  modified_base (9)..(9): 2'-deoxy-2'-fluoroguanosine
  modified_base (10)..(10): gm
  modified_base (11)..(11): 2'-deoxy-2'-fluorouridine
  modified_base (12)..(12): 2'-deoxy-2'-fluorocytidine
  modified_base (13)..(13): cm
  modified_base (14)..(14): 2'-deoxy-2'-fluorocytidine
  modified_base (15)..(15): gm
  modified_base (16)..(16): 2'-deoxy-2'-fluorouridine
  modified_base (17)..(17): um
  modified_base (18)..(18): 2'-deoxy-2'-fluoroadenosine
  modified_base (19)..(19): 2'-O-methyladenosine
  modified_base (20)..(20): 2'-deoxy-2'-fluoroadenosine
  modified_base (21)..(21): 2'-O-methyladenosine
uccacaguggucccguuaaaa

SEQ ID NO: 5507 - RNA, 21 nt, Artificial Sequence
  siRNA sense strand against b2GPI
  modified_base (1)..(1): 2'-deoxy-2'-fluorocytidine
  modified_base (2)..(2): cm
  misc_feature (2)..(3): 5'-phosphonothioate
  modified_base (3)..(3): 2'-deoxy-2'-fluoroadenosine
  modified_base (4)..(4): cm
  modified_base (5)..(5): 2'-deoxy-2'-fluoroadenosine
  modified_base (6)..(6): gm
  modified_base (7)..(7): 2'-deoxy-2'-fluorouridine
  modified_base (8)..(8): gm
  modified_base (9)..(9): 2'-deoxy-2'-fluoroguanosine
  modified_base (10)..(10): um
  modified_base (11)..(11): 2'-deoxy-2'-fluorocytidine
  modified_base (12)..(12): 2'-deoxy-2'-fluorocytidine
  modified_base (13)..(13): cm
  modified_base (14)..(14): 2'-deoxy-2'-fluoroguanosine
  modified_base (15)..(15): um
  modified_base (16)..(16): 2'-deoxy-2'-fluorouridine
  modified_base (17)..(17): 2'-O-methyladenosine
  modified_base (18)..(18): 2'-deoxy-2'-fluoroadenosine
  modified_base (19)..(19): 2'-O-methyladenosine
  modified_base (20)..(20): 2'-deoxy-2'-fluoroadenosine
  modified_base (21)..(21): 2'-O-methyladenosine
ccacaguggucccguuaaaaa

SEQ ID NO: 5508 - RNA, 21 nt, Artificial Sequence
  siRNA sense strand against b2GPI
  modified_base (1)..(1): 2'-deoxy-2'-fluorocytidine
  modified_base (2)..(2): 2'-O-methyladenosine
  misc_feature (2)..(3): 5'-phosphonothioate
  modified_base (3)..(3): 2'-deoxy-2'-fluorocytidine
  modified_base (4)..(4): 2'-O-methyladenosine
  modified_base (5)..(5): 2'-deoxy-2'-fluoroguanosine
  modified_base (6)..(6): um
  modified_base (7)..(7): 2'-deoxy-2'-fluoroguanosine
  modified_base (8)..(8): gm
  modified_base (9)..(9): 2'-deoxy-2'-fluorouridine
  modified_base (10)..(10): cm
  modified_base (11)..(11): 2'-deoxy-2'-fluorocytidine
  modified_base (12)..(12): 2'-deoxy-2'-fluorocytidine
  modified_base (13)..(13): gm
  modified_base (14)..(14): 2'-deoxy-2'-fluorouridine
  modified_base (15)..(15): um
  modified_base (16)..(16): 2'-deoxy-2'-fluoroadenosine
  modified_base (17)..(17): 2'-O-methyladenosine
  modified_base (18)..(18): 2'-deoxy-2'-fluoroadenosine
  modified_base (19)..(19): 2'-O-methyladenosine
  modified_base (20)..(20): 2'-deoxy-2'-fluoroadenosine
  modified_base (21)..(21): cm
cacaguggucccguuaaaaac

SEQ ID NO: 5509 - RNA, 21 nt, Artificial Sequence
  siRNA sense strand against b2GPI
  modified_base (1)..(1): 2'-deoxy-2'-fluoroadenosine
  modified_base (2)..(2): cm
  misc_feature (2)..(3): 5'-phosphonothioate
  modified_base (3)..(3): 2'-deoxy-2'-fluoroadenosine
  modified_base (4)..(4): gm
  modified_base (5)..(5): 2'-deoxy-2'-fluorouridine
  modified_base (6)..(6): gm
  modified_base (7)..(7): 2'-deoxy-2'-fluoroguanosine
  modified_base (8)..(8): um
  modified_base (9)..(9): 2'-deoxy-2'-fluorocytidine
  modified_base (10)..(10): cm
  modified_base (11)..(11): 2'-deoxy-2'-fluorocytidine
  modified_base (12)..(12): 2'-deoxy-2'-fluoroguanosine
  modified_base (13)..(13): um
  modified_base (14)..(14): 2'-deoxy-2'-fluorouridine
  modified_base (15)..(15): 2'-O-methyladenosine
  modified_base (16)..(16): 2'-deoxy-2'-fluoroadenosine
  modified_base (17)..(17): 2'-O-methyladenosine
  modified_base (18)..(18): 2'-deoxy-2'-fluoroadenosine
  modified_base (19)..(19): 2'-O-methyladenosine
  modified_base (20)..(20): 2'-deoxy-2'-fluorocytidine
  modified_base (21)..(21): 2'-O-methyladenosine
acaguggucccguuaaaaaca

SEQ ID NO: 5510 - RNA, 21 nt, Artificial Sequence
  siRNA sense strand against b2GPI
  modified_base (1)..(1): 2'-deoxy-2'-fluorocytidine
  modified_base (2)..(2): 2'-O-methyladenosine
  misc_feature (2)..(3): 5'-phosphonothioate
  modified_base (3)..(3): 2'-deoxy-2'-fluoroguanosine
  modified_base (4)..(4): um
  modified_base (5)..(5): 2'-deoxy-2'-fluoroguanosine
  modified_base (6)..(6): gm
  modified_base (7)..(7): 2'-deoxy-2'-fluorouridine
  modified_base (8)..(8): cm
  modified_base (9)..(9): 2'-deoxy-2'-fluorocytidine
  modified_base (10)..(10): cm
  modified_base (11)..(11): 2'-deoxy-2'-fluoroguanosine
  modified_base (12)..(12): 2'-deoxy-2'-fluorouridine
  modified_base (13)..(13): um
  modified_base (14)..(14): 2'-deoxy-2'-fluoroadenosine
  modified_base (15)..(15): 2'-O-methyladenosine
  modified_base (16)..(16): 2'-deoxy-2'-fluoroadenosine
  modified_base (17)..(17): 2'-O-methyladenosine
  modified_base (18)..(18): 2'-deoxy-2'-fluoroadenosine
  modified_base (19)..(19): cm
  modified_base (20)..(20): 2'-deoxy-2'-fluoroadenosine
  modified_base (21)..(21): um
caguggucccguuaaaaacau

SEQ ID NO: 5511 - RNA, 21 nt, Artificial Sequence
  siRNA sense strand against b2GPI
  modified_base (1)..(1): 2'-deoxy-2'-fluoroadenosine
  modified_base (2)..(2): gm
  misc_feature (2)..(3): 5'-phosphonothioate
  modified_base (3)..(3): 2'-deoxy-2'-fluorouridine
  modified_base (4)..(4): gm
  modified_base (5)..(5): 2'-deoxy-2'-fluoroguanosine
  modified_base (6)..(6): um
  modified_base (7)..(7): 2'-deoxy-2'-fluorocytidine
  modified_base (8)..(8): cm
  modified_base (9)..(9): 2'-deoxy-2'-fluorocytidine
  modified_base (10)..(10): gm
  modified_base (11)..(11): 2'-deoxy-2'-fluorouridine
  modified_base (12)..(12): 2'-deoxy-2'-fluorouridine
  modified_base (13)..(13): 2'-O-methyladenosine
  modified_base (14)..(14): 2'-deoxy-2'-fluoroadenosine
  modified_base (15)..(15): 2'-O-methyladenosine
  modified_base (16)..(16): 2'-deoxy-2'-fluoroadenosine
  modified_base (17)..(17): 2'-O-methyladenosine
  modified_base (18)..(18): 2'-deoxy-2'-fluorocytidine
  modified_base (19)..(19): 2'-O-methyladenosine
  modified_base (20)..(20): 2'-deoxy-2'-fluorouridine
  modified_base (21)..(21): um
aguggucccguuaaaaacauu

SEQ ID NO: 5512 - RNA, 21 nt, Artificial Sequence
  siRNA sense strand against b2GPI
  modified_base (1)..(1): 2'-deoxy-2'-fluoroguanosine
  modified_base (2)..(2): um
  misc_feature (2)..(3): 5'-phosphonothioate
  modified_base (3)..(3): 2'-deoxy-2'-fluoroguanosine
  modified_base (4)..(4): gm
  modified_base (5)..(5): 2'-deoxy-2'-fluorouridine
  modified_base (6)..(6): cm
  modified_base (7)..(7): 2'-deoxy-2'-fluorocytidine
  modified_base (8)..(8): cm
  modified_base (9)..(9): 2'-deoxy-2'-fluoroguanosine
  modified_base (10)..(10): um
  modified_base (11)..(11): 2'-deoxy-2'-fluorouridine
  modified_base (12)..(12): 2'-deoxy-2'-fluoroadenosine
  modified_base (13)..(13): 2'-O-methyladenosine
  modified_base (14)..(14): 2'-deoxy-2'-fluoroadenosine
  modified_base (15)..(15): 2'-O-methyladenosine
  modified_base (16)..(16): 2'-deoxy-2'-fluoroadenosine
  modified_base (17)..(17): cm
  modified_base (18)..(18): 2'-deoxy-2'-fluoroadenosine
  modified_base (19)..(19): um
  modified_base (20)..(20): 2'-deoxy-2'-fluorouridine
  modified_base (21)..(21): cm
guggucccguuaaaaacauuc

SEQ ID NO: 5513 - RNA, 21 nt, Artificial Sequence
  siRNA sense strand against b2GPI
  modified_base (1)..(1): 2'-deoxy-2'-fluorouridine
  modified_base (2)..(2): gm
  misc_feature (2)..(3): 5'-phosphonothioate
  modified_base (3)..(3): 2'-deoxy-2'-fluoroguanosine
  modified_base (4)..(4): um
  modified_base (5)..(5): 2'-deoxy-2'-fluorocytidine
  modified_base (6)..(6): cm
  modified_base (7)..(7): 2'-deoxy-2'-fluorocytidine
  modified_base (8)..(8): gm
  modified_base (9)..(9): 2'-deoxy-2'-fluorouridine
  modified_base (10)..(10): um
  modified_base (11)..(11): 2'-deoxy-2'-fluoroadenosine
  modified_base (12)..(12): 2'-deoxy-2'-fluoroadenosine
  modified_base (13)..(13): 2'-O-methyladenosine
  modified_base (14)..(14): 2'-deoxy-2'-fluoroadenosine
  modified_base (15)..(15): 2'-O-methyladenosine
  modified_base (16)..(16): 2'-deoxy-2'-fluorocytidine
  modified_base (17)..(17): 2'-O-methyladenosine
  modified_base (18)..(18): 2'-deoxy-2'-fluorouridine
  modified_base (19)..(19): um
  modified_base (20)..(20): 2'-deoxy-2'-fluorocytidine
  modified_base (21)..(21): um
uggucccguuaaaaacauucu

SEQ ID NO: 5514 - RNA, 21 nt, Artificial Sequence
  siRNA sense strand against b2GPI
  modified_base (1)..(1): 2'-deoxy-2'-fluoroguanosine
  modified_base (2)..(2): gm
  misc_feature (2)..(3): 5'-phosphonothioate
  modified_base (3)..(3): 2'-deoxy-2'-fluorouridine
  modified_base (4)..(4): cm
  modified_base (5)..(5): 2'-deoxy-2'-fluorocytidine
  modified_base (6)..(6): cm
  modified_base (7)..(7): 2'-deoxy-2'-fluoroguanosine
  modified_base (8)..(8): um
  modified_base (9)..(9): 2'-deoxy-2'-fluorouridine
  modified_base (10)..(10): 2'-O-methyladenosine
  modified_base (11)..(11): 2'-deoxy-2'-fluoroadenosine
  modified_base (12)..(12): 2'-deoxy-2'-fluoroadenosine
  modified_base (13)..(13): 2'-O-methyladenosine
  modified_base (14)..(14): 2'-deoxy-2'-fluoroadenosine
  modified_base (15)..(15): cm
  modified_base (16)..(16): 2'-deoxy-2'-fluoroadenosine
  modified_base (17)..(17): um
  modified_base (18)..(18): 2'-deoxy-2'-fluorouridine
  modified_base (19)..(19): cm
  modified_base (20)..(20): 2'-deoxy-2'-fluorouridine
  modified_base (21)..(21): 2'-O-methyladenosine
ggucccguuaaaaacauucua

SEQ ID NO: 5515 - RNA, 21 nt, Artificial Sequence
  siRNA sense strand against b2GPI
  modified_base (1)..(1): 2'-deoxy-2'-fluoroguanosine
  modified_base (2)..(2): um
  misc_feature (2)..(3): 5'-phosphonothioate
  modified_base (3)..(3): 2'-deoxy-2'-fluorocytidine
  modified_base (4)..(4): cm
  modified_base (5)..(5): 2'-deoxy-2'-fluorocytidine
  modified_base (6)..(6): gm
  modified_base (7)..(7): 2'-deoxy-2'-fluorouridine
  modified_base (8)..(8): um
  modified_base (9)..(9): 2'-deoxy-2'-fluoroadenosine
  modified_base (10)..(10): 2'-O-methyladenosine
  modified_base (11)..(11): 2'-deoxy-2'-fluoroadenosine
  modified_base (12)..(12): 2'-deoxy-2'-fluoroadenosine
  modified_base (13)..(13): 2'-O-methyladenosine
  modified_base (14)..(14): 2'-deoxy-2'-fluorocytidine
  modified_base (15)..(15): 2'-O-methyladenosine
  modified_base (16)..(16): 2'-deoxy-2'-fluorouridine
  modified_base (17)..(17): um
  modified_base (18)..(18): 2'-deoxy-2'-fluorocytidine
  modified_base (19)..(19): um
  modified_base (20)..(20): 2'-deoxy-2'-fluoroadenosine
  modified_base (21)..(21): um
gucccguuaaaaacauucuau

SEQ ID NO: 5516 - RNA, 21 nt, Artificial Sequence
  siRNA sense strand against b2GPI
  modified_base (1)..(1): 2'-deoxy-2'-fluorouridine
  modified_base (2)..(2): cm
  misc_feature (2)..(3): 5'-phosphonothioate
  modified_base (3)..(3): 2'-deoxy-2'-fluorocytidine
  modified_base (4)..(4): cm
  modified_base (5)..(5): 2'-deoxy-2'-fluoroguanosine
  modified_base (6)..(6): um
  modified_base (7)..(7): 2'-deoxy-2'-fluorouridine
  modified_base (8)..(8): 2'-O-methyladenosine
  modified_base (9)..(9): 2'-deoxy-2'-fluoroadenosine
  modified_base (10)..(10): 2'-O-methyladenosine
  modified_base (11)..(11): 2'-deoxy-2'-fluoroadenosine
  modified_base (12)..(12): 2'-deoxy-2'-fluoroadenosine
  modified_base (13)..(13): cm
  modified_base (14)..(14): 2'-deoxy-2'-fluoroadenosine
  modified_base (15)..(15): um
  modified_base (16)..(16): 2'-deoxy-2'-fluorouridine
  modified_base (17)..(17): cm
  modified_base (18)..(18): 2'-deoxy-2'-fluorouridine
  modified_base (19)..(19): 2'-O-methyladenosine
  modified_base (20)..(20): 2'-deoxy-2'-fluorouridine
  modified_base (21)..(21): gm
ucccguuaaaaacauucuaug

SEQ ID NO: 5517 - RNA, 21 nt, Artificial Sequence
  siRNA sense strand against b2GPI
  modified_base (1)..(1): 2'-deoxy-2'-fluorocytidine
  modified_base (2)..(2): cm
  misc_feature (2)..(3): 5'-phosphonothioate
  modified_base (3)..(3): 2'-deoxy-2'-fluorocytidine
  modified_base (4)..(4): gm
  modified_base (5)..(5): 2'-deoxy-2'-fluorouridine
  modified_base (6)..(6): um
  modified_base (7)..(7): 2'-deoxy-2'-fluoroadenosine
  modified_base (8)..(8): 2'-O-methyladenosine
  modified_base (9)..(9): 2'-deoxy-2'-fluoroadenosine
  modified_base (10)..(10): 2'-O-methyladenosine
  modified_base (11)..(11): 2'-deoxy-2'-fluoroadenosine
  modified_base (12)..(12): 2'-deoxy-2'-fluorocytidine
  modified_base (13)..(13): 2'-O-methyladenosine
  modified_base (14)..(14): 2'-deoxy-2'-fluorouridine
  modified_base (15)..(15): um
  modified_base (16)..(16): 2'-deoxy-2'-fluorocytidine
  modified_base (17)..(17): um
  modified_base (18)..(18): 2'-deoxy-2'-fluoroadenosine
  modified_base (19)..(19): um
  modified_base (20)..(20): 2'-deoxy-2'-fluoroguanosine
  modified_base (21)..(21): 2'-O-methyladenosine
cccguuaaaaacauucuauga

SEQ ID NO: 5518 - RNA, 21 nt, Artificial Sequence
  siRNA sense strand against b2GPI
  modified_base (1)..(1): 2'-deoxy-2'-fluoroadenosine
  modified_base (2)..(2): 2'-O-methyladenosine
  misc_feature (2)..(3): 5'-phosphonothioate
  modified_base (3)..(3): 2'-deoxy-2'-fluorocytidine
  modified_base (4)..(4): 2'-O-methyladenosine
  modified_base (5)..(5): 2'-deoxy-2'-fluorouridine
  modified_base (6)..(6): um
  modified_base (7)..(7): 2'-deoxy-2'-fluorocytidine
  modified_base (8)..(8): um
  modified_base (9)..(9): 2'-deoxy-2'-fluoroadenosine
  modified_base (10)..(10): um
  modified_base (11)..(11): 2'-deoxy-2'-fluoroguanosine
  modified_base (12)..(12): 2'-deoxy-2'-fluoroadenosine
  modified_base (13)..(13): gm
  modified_base (14)..(14): 2'-deoxy-2'-fluorocytidine
  modified_base (15)..(15): cm
  modified_base (16)..(16): 2'-deoxy-2'-fluoroadenosine
  modified_base (17)..(17): gm
  modified_base (18)..(18): 2'-deoxy-2'-fluoroguanosine
  modified_base (19)..(19): 2'-O-methyladenosine
  modified_base (20)..(20): 2'-deoxy-2'-fluoroguanosine
  modified_base (21)..(21): 2'-O-methyladenosine
aacauucuaugagccaggaga

SEQ ID NO: 5519 - RNA, 21 nt, Artificial Sequence
  siRNA sense strand against b2GPI
  modified_base (1)..(1): 2'-deoxy-2'-fluoroadenosine
  modified_base (2)..(2): cm
  misc_feature (2)..(3): 5'-phosphonothioate
  modified_base (3)..(3): 2'-deoxy-2'-fluoroadenosine
  modified_base (4)..(4): um
  modified_base (5)..(5): 2'-deoxy-2'-fluorouridine
  modified_base (6)..(6): cm
  modified_base (7)..(7): 2'-deoxy-2'-fluorouridine
  modified_base (8)..(8): 2'-O-methyladenosine
  modified_base (9)..(9): 2'-deoxy-2'-fluorouridine
  modified_base (10)..(10): gm
  modified_base (11)..(11): 2'-deoxy-2'-fluoroadenosine
  modified_base (12)..(12): 2'-deoxy-2'-fluoroguanosine
  modified_base (13)..(13): cm
  modified_base (14)..(14): 2'-deoxy-2'-fluorocytidine
  modified_base (15)..(15): 2'-O-methyladenosine
  modified_base (16)..(16): 2'-deoxy-2'-fluoroguanosine
  modified_base (17)..(17): gm
  modified_base (18)..(18): 2'-deoxy-2'-fluoroadenosine
  modified_base (19)..(19): gm
  modified_base (20)..(20): 2'-deoxy-2'-fluoroadenosine
  modified_base (21)..(21): 2'-O-methyladenosine
acauucuaugagccaggagaa

SEQ ID NO: 5520 - RNA, 21 nt, Artificial Sequence
  siRNA sense strand against b2GPI
  modified_base (1)..(1): 2'-deoxy-2'-fluorouridine
  modified_base (2)..(2): um
  misc_feature (2)..(3): 5'-phosphonothioate
  modified_base (3)..(3): 2'-deoxy-2'-fluorocytidine
  modified_base (4)..(4): um
  modified_base (5)..(5): 2'-deoxy-2'-fluoroadenosine
  modified_base (6)..(6): um
  modified_base (7)..(7): 2'-deoxy-2'-fluoroguanosine
  modified_base (8)..(8): 2'-O-methyladenosine
  modified_base (9)..(9): 2'-deoxy-2'-fluoroguanosine
  modified_base (10)..(10): cm
  modified_base (11)..(11): 2'-deoxy-2'-fluorocytidine
  modified_base (12)..(12): 2'-deoxy-2'-fluoroadenosine
  modified_base (13)..(13): gm
  modified_base (14)..(14): 2'-deoxy-2'-fluoroguanosine
  modified_base (15)..(15): 2'-O-methyladenosine
  modified_base (16)..(16): 2'-deoxy-2'-fluoroguanosine
  modified_base (17)..(17): 2'-O-methyladenosine
  modified_base (18)..(18): 2'-deoxy-2'-fluoroadenosine
  modified_base (19)..(19): gm
  modified_base (20)..(20): 2'-deoxy-2'-fluoroadenosine
  modified_base (21)..(21): gm
uucuaugagccaggagaagag

SEQ ID NO: 5521 - RNA, 21 nt, Artificial Sequence
  siRNA sense strand against b2GPI
  modified_base (1)..(1): 2'-deoxy-2'-fluorouridine
  modified_base (2)..(2): cm
  misc_feature (2)..(3): 5'-phosphonothioate
  modified_base (3)..(3): 2'-deoxy-2'-fluorouridine
  modified_base (4)..(4): 2'-O-methyladenosine
  modified_base (5)..(5): 2'-deoxy-2'-fluorouridine
  modified_base (6)..(6): gm
  modified_base (7)..(7): 2'-deoxy-2'-fluoroadenosine
  modified_base (8)..(8): gm
  modified_base (9)..(9): 2'-deoxy-2'-fluorocytidine
  modified_base (10)..(10): cm
  modified_base (11)..(11): 2'-deoxy-2'-fluoroadenosine
  modified_base (12)..(12): 2'-deoxy-2'-fluoroguanosine
  modified_base (13)..(13): gm
  modified_base (14)..(14): 2'-deoxy-2'-fluoroadenosine
  modified_base (15)..(15): gm
  modified_base (16)..(16): 2'-deoxy-2'-fluoroadenosine
  modified_base (17)..(17): 2'-O-methyladenosine
  modified_base (18)..(18): 2'-deoxy-2'-fluoroguanosine
  modified_base (19)..(19): 2'-O-methyladenosine
  modified_base (20)..(20): 2'-deoxy-2'-fluoroguanosine
  modified_base (21)..(21): 2'-O-methyladenosine
ucuaugagccaggagaagaga

SEQ ID NO: 5522 - RNA, 21 nt, Artificial Sequence
  siRNA sense strand against b2GPI
  modified_base (1)..(1): 2'-deoxy-2'-fluorocytidine
  modified_base (2)..(2): um
  misc_feature (2)..(3): 5'-phosphonothioate
  modified_base (3)..(3): 2'-deoxy-2'-fluoroadenosine
  modified_base (4)..(4): um
  modified_base (5)..(5): 2'-deoxy-2'-fluoroguanosine
  modified_base (6)..(6): 2'-O-methyladenosine
  modified_base (7)..(7): 2'-deoxy-2'-fluoroguanosine
  modified_base (8)..(8): cm
  modified_base (9)..(9): 2'-deoxy-2'-fluorocytidine
  modified_base (10)..(10): 2'-O-methyladenosine
  modified_base (11)..(11): 2'-deoxy-2'-fluoroguanosine
  modified_base (12)..(12): 2'-deoxy-2'-fluoroguanosine
  modified_base (13)..(13): 2'-O-methyladenosine
  modified_base (14)..(14): 2'-deoxy-2'-fluoroguanosine
  modified_base (15)..(15): 2'-O-methyladenosine
  modified_base (16)..(16): 2'-deoxy-2'-fluoroadenosine
  modified_base (17)..(17): gm
  modified_base (18)..(18): 2'-deoxy-2'-fluoroadenosine
  modified_base (19)..(19): gm
  modified_base (20)..(20): 2'-deoxy-2'-fluoroadenosine
  modified_base (21)..(21): um
cuaugagccaggagaagagau

SEQ ID NO: 5523 - RNA, 21 nt, Artificial Sequence
  siRNA sense strand against b2GPI
  modified_base (1)..(1): 2'-deoxy-2'-fluorouridine
  modified_base (2)..(2): 2'-O-methyladenosine
  misc_feature (2)..(3): 5'-phosphonothioate
  modified_base (3)..(3): 2'-deoxy-2'-fluorouridine
  modified_base (4)..(4): gm
  modified_base (5)..(5): 2'-deoxy-2'-fluoroadenosine
  modified_base (6)..(6): gm
  modified_base (7)..(7): 2'-deoxy-2'-fluorocytidine
  modified_base (8)..(8): cm
  modified_base (9)..(9): 2'-deoxy-2'-fluoroadenosine
  modified_base (10)..(10): gm
  modified_base (11)..(11): 2'-deoxy-2'-fluoroguanosine
  modified_base (12)..(12): 2'-deoxy-2'-fluoroadenosine
  modified_base (13)..(13): gm
  modified_base (14)..(14): 2'-deoxy-2'-fluoroadenosine
  modified_base (15)..(15): 2'-O-methyladenosine
  modified_base (16)..(16): 2'-deoxy-2'-fluoroguanosine
  modified_base (17)..(17): 2'-O-methyladenosine
  modified_base (18)..(18): 2'-deoxy-2'-fluoroguanosine
  modified_base (19)..(19): 2'-O-methyladenosine
  modified_base (20)..(20): 2'-deoxy-2'-fluorouridine
  modified_base (21)..(21): um
uaugagccaggagaagagauu

SEQ ID NO: 5524 - RNA, 21 nt, Artificial Sequence
  siRNA sense strand against b2GPI
  modified_base (1)..(1): 2'-deoxy-2'-fluoroadenosine
  modified_base (2)..(2): um
  misc_feature (2)..(3): 5'-phosphonothioate
  modified_base (3)..(3): 2'-deoxy-2'-fluoroguanosine
  modified_base (4)..(4): 2'-O-methyladenosine
  modified_base (5)..(5): 2'-deoxy-2'-fluoroguanosine
  modified_base (6)..(6): cm
  modified_base (7)..(7): 2'-deoxy-2'-fluorocytidine
  modified_base (8)..(8): 2'-O-methyladenosine
  modified_base (9)..(9): 2'-deoxy-2'-fluoroguanosine
  modified_base (10)..(10): gm
  modified_base (11)..(11): 2'-deoxy-2'-fluoroadenosine
  modified_base (12)..(12): 2'-deoxy-2'-fluoroguanosine
  modified_base (13)..(13): 2'-O-methyladenosine
  modified_base (14)..(14): 2'-deoxy-2'-fluoroadenosine
  modified_base (15)..(15): gm
  modified_base (16)..(16): 2'-deoxy-2'-fluoroadenosine
  modified_base (17)..(17): gm
  modified_base (18)..(18): 2'-deoxy-2'-fluoroadenosine
  modified_base (19)..(19): um
  modified_base (20)..(20): 2'-deoxy-2'-fluorouridine
  modified_base (21)..(21): 2'-O-methyladenosine
augagccaggagaagagauua

SEQ ID NO: 5525 - RNA, 21 nt, Artificial Sequence
  siRNA sense strand against b2GPI
  modified_base (1)..(1): 2'-deoxy-2'-fluoroguanosine
  modified_base (2)..(2): 2'-O-methyladenosine
  misc_feature (2)..(3): 5'-phosphonothioate
  modified_base (3)..(3): 2'-deoxy-2'-fluoroguanosine
  modified_base (4)..(4): cm
  modified_base (5)..(5): 2'-deoxy-2'-fluorocytidine
  modified_base (6)..(6): 2'-O-methyladenosine
  modified_base (7)..(7): 2'-deoxy-2'-fluoroguanosine
  modified_base (8)..(8): gm
  modified_base (9)..(9): 2'-deoxy-2'-fluoroadenosine
  modified_base (10)..(10): gm
  modified_base (11)..(11): 2'-deoxy-2'-fluoroadenosine
  modified_base (12)..(12): 2'-deoxy-2'-fluoroadenosine
  modified_base (13)..(13): gm
  modified_base (14)..(14): 2'-deoxy-2'-fluoroadenosine
  modified_base (15)..(15): gm
  modified_base (16)..(16): 2'-deoxy-2'-fluoroadenosine
  modified_base (17)..(17): um
  modified_base (18)..(18): 2'-deoxy-2'-fluorouridine
  modified_base (19)..(19): 2'-O-methyladenosine
  modified_base (20)..(20): 2'-deoxy-2'-fluorocytidine
  modified_base (21)..(21): gm
gagccaggagaagagauuacg

SEQ ID NO: 5526 - RNA, 21 nt, Artificial Sequence
  siRNA sense strand against b2GPI
  modified_base (1)..(1): 2'-deoxy-2'-fluoroadenosine
  modified_base (2)..(2): gm
  misc_feature (2)..(3): 5'-phosphonothioate
  modified_base (3)..(3): 2'-deoxy-2'-fluorocytidine
  modified_base (4)..(4): cm
  modified_base (5)..(5): 2'-deoxy-2'-fluoroadenosine
  modified_base (6)..(6): gm
  modified_base (7)..(7): 2'-deoxy-2'-fluoroguanosine
  modified_base (8)..(8): 2'-O-methyladenosine
  modified_base (9)..(9): 2'-deoxy-2'-fluoroguanosine
  modified_base (10)..(10): 2'-O-methyladenosine
  modified_base (11)..(11): 2'-deoxy-2'-fluoroadenosine
  modified_base (12)..(12): 2'-deoxy-2'-fluoroguanosine
  modified_base (13)..(13): 2'-O-methyladenosine
  modified_base (14)..(14): 2'-deoxy-2'-fluoroguanosine
  modified_base (15)..(15): 2'-O-methyladenosine
  modified_base (16)..(16): 2'-deoxy-2'-fluorouridine
  modified_base (17)..(17): um
  modified_base (18)..(18): 2'-deoxy-2'-fluoroadenosine
  modified_base (19)..(19): cm
  modified_base (20)..(20): 2'-deoxy-2'-fluoroguanosine
  modified_base (21)..(21): um
agccaggagaagagauuacgu

SEQ ID NO: 5527 - RNA, 21 nt, Artificial Sequence
  siRNA sense strand against b2GPI
  modified_base (1)..(1): 2'-deoxy-2'-fluoroguanosine
  modified_base (2)..(2): cm
  misc_feature (2)..(3): 5'-phosphonothioate
  modified_base (3)..(3): 2'-deoxy-2'-fluorocytidine
  modified_base (4)..(4): 2'-O-methyladenosine
  modified_base (5)..(5): 2'-deoxy-2'-fluoroguanosine
  modified_base (6)..(6): gm
  modified_base (7)..(7): 2'-deoxy-2'-fluoroadenosine
  modified_base (8)..(8): gm
  modified_base (9)..(9): 2'-deoxy-2'-fluoroadenosine
  modified_base (10)..(10): 2'-O-methyladenosine
  modified_base (11)..(11): 2'-deoxy-2'-fluoroguanosine
  modified_base (12)..(12): 2'-deoxy-2'-fluoroadenosine
  modified_base (13)..(13): gm
  modified_base (14)..(14): 2'-deoxy-2'-fluoroadenosine
  modified_base (15)..(15): um
  modified_base (16)..(16): 2'-deoxy-2'-fluorouridine
  modified_base (17)..(17): 2'-O-methyladenosine
  modified_base (18)..(18): 2'-deoxy-2'-fluorocytidine
  modified_base (19)..(19): gm
  modified_base (20)..(20): 2'-deoxy-2'-fluorouridine
  modified_base (21)..(21): 2'-O-methyladenosine
gccaggagaagagauuacgua

SEQ ID NO: 5528 - RNA, 21 nt, Artificial Sequence
  siRNA sense strand against b2GPI
  modified_base (1)..(1): 2'-deoxy-2'-fluorocytidine
  modified_base (2)..(2): cm
  misc_feature (2)..(3): 5'-phosphonothioate
  modified_base (3)..(3): 2'-deoxy-2'-fluoroadenosine
  modified_base (4)..(4): gm
  modified_base (5)..(5): 2'-deoxy-2'-fluoroguanosine
  modified_base (6)..(6): 2'-O-methyladenosine
  modified_base (7)..(7): 2'-deoxy-2'-fluoroguanosine
  modified_base (8)..(8): 2'-O-methyladenosine
  modified_base (9)..(9): 2'-deoxy-2'-fluoroadenosine
  modified_base (10)..(10): gm
  modified_base (11)..(11): 2'-deoxy-2'-fluoroadenosine
  modified_base (12)..(12): 2'-deoxy-2'-fluoroguanosine
  modified_base (13)..(13): 2'-O-methyladenosine
  modified_base (14)..(14): 2'-deoxy-2'-fluorouridine
  modified_base (15)..(15): um
  modified_base (16)..(16): 2'-deoxy-2'-fluoroadenosine
  modified_base (17)..(17): cm
  modified_base (18)..(18): 2'-deoxy-2'-fluoroguanosine
  modified_base (19)..(19): um
  modified_base (20)..(20): 2'-deoxy-2'-fluoroadenosine
  modified_base (21)..(21): um
ccaggagaagagauuacguau

SEQ ID NO: 5529 - RNA, 21 nt, Artificial Sequence
  siRNA sense strand against b2GPI
  modified_base (1)..(1): 2'-deoxy-2'-fluorocytidine
  modified_base (2)..(2): 2'-O-methyladenosine
  misc_feature (2)..(3): 5'-phosphonothioate
  modified_base (3)..(3): 2'-deoxy-2'-fluoroguanosine
  modified_base (4)..(4): gm
  modified_base (5)..(5): 2'-deoxy-2'-fluoroadenosine
  modified_base (6)..(6): gm
  modified_base (7)..(7): 2'-deoxy-2'-fluoroadenosine
  modified_base (8)..(8): 2'-O-methyladenosine
  modified_base (9)..(9): 2'-deoxy-2'-fluoroguanosine
  modified_base (10)..(10): 2'-O-methyladenosine
  modified_base (11)..(11): 2'-deoxy-2'-fluoroguanosine
  modified_base (12)..(12): 2'-deoxy-2'-fluoroadenosine
  modified_base (13)..(13): um
  modified_base (14)..(14): 2'-deoxy-2'-fluorouridine
  modified_base (15)..(15): 2'-O-methyladenosine
  modified_base (16)..(16): 2'-deoxy-2'-fluorocytidine
  modified_base (17)..(17): gm
  modified_base (18)..(18): 2'-deoxy-2'-fluorouridine
  modified_base (19)..(19): 2'-O-methyladenosine
  modified_base (20)..(20): 2'-deoxy-2'-fluorouridine
  modified_base (21)..(21): um
caggagaagagauuacguauu

SEQ ID NO: 5530 - RNA, 21 nt, Artificial Sequence
  siRNA sense strand against b2GPI
  modified_base (1)..(1): 2'-deoxy-2'-fluoroadenosine
  modified_base (2)..(2): gm
  misc_feature (2)..(3): 5'-phosphonothioate
  modified_base (3)..(3): 2'-deoxy-2'-fluoroguanosine
  modified_base (4)..(4): 2'-O-methyladenosine
  modified_base (5)..(5): 2'-deoxy-2'-fluoroguanosine
  modified_base (6)..(6): 2'-O-methyladenosine
  modified_base (7)..(7): 2'-deoxy-2'-fluoroadenosine
  modified_base (8)..(8): gm
  modified_base (9)..(9): 2'-deoxy-2'-fluoroadenosine
  modified_base (10)..(10): gm
  modified_base (11)..(11): 2'-deoxy-2'-fluoroadenosine
  modified_base (12)..(12): 2'-deoxy-2'-fluorouridine
  modified_base (13)..(13): um
  modified_base (14)..(14): 2'-deoxy-2'-fluoroadenosine
  modified_base (15)..(15): cm
  modified_base (16)..(16): 2'-deoxy-2'-fluoroguanosine
  modified_base (17)..(17): um
  modified_base (18)..(18): 2'-deoxy-2'-fluoroadenosine
  modified_base (19)..(19): um
  modified_base (20)..(20): 2'-deoxy-2'-fluorouridine
  modified_base (21)..(21): cm
aggagaagagauuacguauuc

SEQ ID NO: 5531 - RNA, 21 nt, Artificial Sequence
  siRNA sense strand against b2GPI
  modified_base (1)..(1): 2'-deoxy-2'-fluoroguanosine
  modified_base (2)..(2): gm
  misc_feature (2)..(3): 5'-phosphonothioate
  modified_base (3)..(3): 2'-deoxy-2'-fluoroadenosine
  modified_base (4)..(4): gm
  modified_base (5)..(5): 2'-deoxy-2'-fluoroadenosine
  modified_base (6)..(6): 2'-O-methyladenosine
  modified_base (7)..(7): 2'-deoxy-2'-fluoroguanosine
  modified_base (8)..(8): 2'-O-methyladenosine
  modified_base (9)..(9): 2'-deoxy-2'-fluoroguanosine
  modified_base (10)..(10): 2'-O-methyladenosine
  modified_base (11)..(11): 2'-deoxy-2'-fluorouridine
  modified_base (12)..(12): 2'-deoxy-2'-fluorouridine
  modified_base (13)..(13): 2'-O-methyladenosine
  modified_base (14)..(14): 2'-deoxy-2'-fluorocytidine
  modified_base (15)..(15): gm
  modified_base (16)..(16): 2'-deoxy-2'-fluorouridine
  modified_base (17)..(17): 2'-O-methyladenosine
  modified_base (18)..(18): 2'-deoxy-2'-fluorouridine
  modified_base (19)..(19): um
  modified_base (20)..(20): 2'-deoxy-2'-fluorocytidine
  modified_base (21)..(21): cm
ggagaagagauuacguauucc

SEQ ID NO: 5532 - RNA, 21 nt, Artificial Sequence
  siRNA sense strand against b2GPI
  modified_base (1)..(1): 2'-deoxy-2'-fluoroguanosine
  modified_base (2)..(2): 2'-O-methyladenosine
  misc_feature (2)..(3): 5'-phosphonothioate
  modified_base (3)..(3): 2'-deoxy-2'-fluoroguanosine
  modified_base (4)..(4): 2'-O-methyladenosine
  modified_base (5)..(5): 2'-deoxy-2'-fluoroadenosine
  modified_base (6)..(6): gm
  modified_base (7)..(7): 2'-deoxy-2'-fluoroadenosine
  modified_base (8)..(8): gm
  modified_base (9)..(9): 2'-deoxy-2'-fluoroadenosine
  modified_base (10)..(10): um
  modified_base (11)..(11): 2'-deoxy-2'-fluorouridine
  modified_base (12)..(12): 2'-deoxy-2'-fluoroadenosine
  modified_base (13)..(13): cm
  modified_base (14)..(14): 2'-deoxy-2'-fluoroguanosine
  modified_base (15)..(15): um
  modified_base (16)..(16): 2'-deoxy-2'-fluoroadenosine
  modified_base (17)..(17): um
  modified_base (18)..(18): 2'-deoxy-2'-fluorouridine
  modified_base (19)..(19): cm
  modified_base (20)..(20): 2'-deoxy-2'-fluorocytidine
  modified_base (21)..(21): um
gagaagagauuacguauuccu

SEQ ID NO: 5533 - RNA, 21 nt, Artificial Sequence
  siRNA sense strand against b2GPI
  modified_base (1)..(1): 2'-deoxy-2'-fluoroadenosine
  modified_base (2)..(2): 2'-O-methyladenosine
  misc_feature (2)..(3): 5'-phosphonothioate
  modified_base (3)..(3): 2'-deoxy-2'-fluoroguanosine
  modified_base (4)..(4): 2'-O-methyladenosine
  modified_base (5)..(5): 2'-deoxy-2'-fluoroguanosine
  modified_base (6)..(6): 2'-O-methyladenosine
  modified_base (7)..(7): 2'-deoxy-2'-fluorouridine
  modified_base (8)..(8): um
  modified_base (9)..(9): 2'-deoxy-2'-fluoroadenosine
  modified_base (10)..(10): cm
  modified_base (11)..(11): 2'-deoxy-2'-fluoroguanosine
  modified_base (12)..(12): 2'-deoxy-2'-fluorouridine
  modified_base (13)..(13): 2'-O-methyladenosine
  modified_base (14)..(14): 2'-deoxy-2'-fluorouridine
  modified_base (15)..(15): um
  modified_base (16)..(16): 2'-deoxy-2'-fluorocytidine
  modified_base (17)..(17): cm
  modified_base (18)..(18): 2'-deoxy-2'-fluorouridine
  modified_base (19)..(19): gm
  modified_base (20)..(20): 2'-deoxy-2'-fluorocytidine
  modified_base (21)..(21): 2'-O-methyladenosine
aagagauuacguauuccugca

SEQ ID NO: 5534 - RNA, 21 nt, Artificial Sequence
  siRNA sense strand against b2GPI
  modified_base (1)..(1): 2'-deoxy-2'-fluoroadenosine
  modified_base (2)..(2): gm
  misc_feature (2)..(3): 5'-phosphonothioate
  modified_base (3)..(3): 2'-deoxy-2'-fluoroadenosine
  modified_base (4)..(4): gm
  modified_base (5)..(5): 2'-deoxy-2'-fluoroadenosine
  modified_base (6)..(6): um
  modified_base (7)..(7): 2'-deoxy-2'-fluorouridine
  modified_base (8)..(8): 2'-O-methyladenosine
  modified_base (9)..(9): 2'-deoxy-2'-fluorocytidine
  modified_base (10)..(10): gm
  modified_base (11)..(11): 2'-deoxy-2'-fluorouridine
  modified_base (12)..(12): 2'-deoxy-2'-fluoroadenosine
  modified_base (13)..(13): um
  modified_base (14)..(14): 2'-deoxy-2'-fluorouridine
  modified_base (15)..(15): cm
  modified_base (16)..(16): 2'-deoxy-2'-fluorocytidine
  modified_base (17)..(17): um
  modified_base (18)..(18): 2'-deoxy-2'-fluoroguanosine
  modified_base (19)..(19): cm
  modified_base (20)..(20): 2'-deoxy-2'-fluoroadenosine
  modified_base (21)..(21): 2'-O-methyladenosine
agagauuacguauuccugcaa

SEQ ID NO: 5535 - RNA, 21 nt, Artificial Sequence
  siRNA sense strand against b2GPI
  modified_base (1)..(1): 2'-deoxy-2'-fluoroguanosine
  modified_base (2)..(2): 2'-O-methyladenosine
  misc_feature (2)..(3): 5'-phosphonothioate
  modified_base (3)..(3): 2'-deoxy-2'-fluoroguanosine
  modified_base (4)..(4): 2'-O-methyladenosine
  modified_base (5)..(5): 2'-deoxy-2'-fluorouridine
  modified_base (6)..(6): um
  modified_base (7)..(7): 2'-deoxy-2'-fluoroadenosine
  modified_base (8)..(8): cm
  modified_base (9)..(9): 2'-deoxy-2'-fluoroguanosine
  modified_base (10)..(10): um
  modified_base (11)..(11): 2'-deoxy-2'-fluoroadenosine
  modified_base (12)..(12): 2'-deoxy-2'-fluorouridine
  modified_base (13)..(13): um
  modified_base (14)..(14): 2'-deoxy-2'-fluorocytidine
  modified_base (15)..(15): cm
  modified_base (16)..(16): 2'-deoxy-2'-fluorouridine
  modified_base (17)..(17): gm
  modified_base (18)..(18): 2'-deoxy-2'-fluorocytidine
  modified_base (19)..(19): 2'-O-methyladenosine
  modified_base (20)..(20): 2'-deoxy-2'-fluoroadenosine
  modified_base (21)..(21): gm
gagauuacguauuccugcaag

SEQ ID NO: 5536 - RNA, 21 nt, Artificial Sequence
  siRNA sense strand against b2GPI
  modified_base (1)..(1): 2'-deoxy-2'-fluorouridine
  modified_base (2)..(2): um
  misc_feature (2)..(3): 5'-phosphonothioate
  modified_base (3)..(3): 2'-deoxy-2'-fluoroadenosine
  modified_base (4)..(4): cm
  modified_base (5)..(5): 2'-deoxy-2'-fluoroguanosine
  modified_base (6)..(6): um
  modified_base (7)..(7): 2'-deoxy-2'-fluoroadenosine
  modified_base (8)..(8): um
  modified_base (9)..(9): 2'-deoxy-2'-fluorouridine
  modified_base (10)..(10): cm
  modified_base (11)..(11): 2'-deoxy-2'-fluorocytidine
  modified_base (12)..(12): 2'-deoxy-2'-fluorouridine
  modified_base (13)..(13): gm
  modified_base (14)..(14): 2'-deoxy-2'-fluorocytidine
  modified_base (15)..(15): 2'-O-methyladenosine
  modified_base (16)..(16): 2'-deoxy-2'-fluoroadenosine
  modified_base (17)..(17): gm
  modified_base (18)..(18): 2'-deoxy-2'-fluorocytidine
  modified_base (19)..(19): cm
  modified_base (20)..(20): 2'-deoxy-2'-fluoroguanosine
  modified_base (21)..(21): gm
uuacguauuccugcaagccgg

SEQ ID NO: 5537 - RNA, 21 nt, Artificial Sequence
  siRNA sense strand against b2GPI
  modified_base (1)..(1): 2'-deoxy-2'-fluoroguanosine
  modified_base (2)..(2): um
  misc_feature (2)..(3): 5'-phosphonothioate
  modified_base (3)..(3): 2'-deoxy-2'-fluoroadenosine
  modified_base (4)..(4): um
  modified_base (5)..(5): 2'-deoxy-2'-fluorouridine
  modified_base (6)..(6): cm
  modified_base (7)..(7): 2'-deoxy-2'-fluorocytidine
  modified_base (8)..(8): um
  modified_base (9)..(9): 2'-deoxy-2'-fluoroguanosine
  modified_base (10)..(10): cm
  modified_base (11)..(11): 2'-deoxy-2'-fluoroadenosine
  modified_base (12)..(12): 2'-deoxy-2'-fluoroadenosine
  modified_base (13)..(13): gm
  modified_base (14)..(14): 2'-deoxy-2'-fluorocytidine
  modified_base (15)..(15): cm
  modified_base (16)..(16): 2'-deoxy-2'-fluoroguanosine
  modified_base (17)..(17): gm
  modified_base (18)..(18): 2'-deoxy-2'-fluoroguanosine
  modified_base (19)..(19): cm
  modified_base (20)..(20): 2'-deoxy-2'-fluorouridine
  modified_base (21)..(21): 2'-O-methyladenosine
guauuccugcaagccgggcua

SEQ ID NO: 5538 - RNA, 21 nt, Artificial Sequence
  siRNA sense strand against b2GPI
  modified_base (1)..(1): 2'-deoxy-2'-fluorouridine
  modified_base (2)..(2): cm
  misc_feature (2)..(3): 5'-phosphonothioate
  modified_base (3)..(3): 2'-deoxy-2'-fluorocytidine
  modified_base (4)..(4): um
  modified_base (5)..(5): 2'-deoxy-2'-fluoroguanosine
  modified_base (6)..(6): cm
  modified_base (7)..(7): 2'-deoxy-2'-fluoroadenosine
  modified_base (8)..(8): 2'-O-methyladenosine
  modified_base (9)..(9): 2'-deoxy-2'-fluoroguanosine
  modified_base (10)..(10): cm
  modified_base (11)..(11): 2'-deoxy-2'-fluorocytidine
  modified_base (12)..(12): 2'-deoxy-2'-fluoroguanosine
  modified_base (13)..(13): gm
  modified_base (14)..(14): 2'-deoxy-2'-fluoroguanosine
  modified_base (15)..(15): cm
  modified_base (16)..(16): 2'-deoxy-2'-fluorouridine
  modified_base (17)..(17): 2'-O-methyladenosine
  modified_base (18)..(18): 2'-deoxy-2'-fluorouridine
  modified_base (19)..(19): gm
  modified_base (20)..(20): 2'-deoxy-2'-fluorouridine
  modified_base (21)..(21): gm
uccugcaagccgggcuaugug

SEQ ID NO: 5539 - RNA, 21 nt, Artificial Sequence
  siRNA sense strand against b2GPI
  modified_base (1)..(1): 2'-deoxy-2'-fluoroguanosine
  modified_base (2)..(2): um
  misc_feature (2)..(3): 5'-phosphonothioate
  modified_base (3)..(3): 2'-deoxy-2'-fluoroguanosine
  modified_base (4)..(4): um
  modified_base (5)..(5): 2'-deoxy-2'-fluorocytidine
  modified_base (6)..(6): cm
  modified_base (7)..(7): 2'-deoxy-2'-fluorocytidine
  modified_base (8)..(8): gm
  modified_base (9)..(9): 2'-deoxy-2'-fluoroadenosine
  modified_base (10)..(10): gm
  modified_base (11)..(11): 2'-deoxy-2'-fluoroguanosine
  modified_base (12)..(12): 2'-deoxy-2'-fluoroadenosine
  modified_base (13)..(13): gm
  modified_base (14)..(14): 2'-deoxy-2'-fluoroguanosine
  modified_base (15)..(15): gm
  modified_base (16)..(16): 2'-deoxy-2'-fluoroadenosine
  modified_base (17)..(17): um
  modified_base (18)..(18): 2'-deoxy-2'-fluoroguanosine
  modified_base (19)..(19): 2'-O-methyladenosine
  modified_base (20)..(20): 2'-deoxy-2'-fluoroguanosine
  modified_base (21)..(21): 2'-O-methyladenosine
gugucccgaggagggaugaga

SEQ ID NO: 5540 - RNA, 21 nt, Artificial Sequence
  siRNA sense strand against b2GPI
  modified_base (1)..(1): 2'-deoxy-2'-fluorouridine
  modified_base (2)..(2): gm
  misc_feature (2)..(3): 5'-phosphonothioate
  modified_base (3)..(3): 2'-deoxy-2'-fluorouridine
  modified_base (4)..(4): cm
  modified_base (5)..(5): 2'-deoxy-2'-fluorocytidine
  modified_base (6)..(6): cm
  modified_base (7)..(7): 2'-deoxy-2'-fluoroguanosine
  modified_base (8)..(8): 2'-O-methyladenosine
  modified_base (9)..(9): 2'-deoxy-2'-fluoroguanosine
  modified_base (10)..(10): gm
  modified_base (11)..(11): 2'-deoxy-2'-fluoroadenosine
  modified_base (12)..(12): 2'-deoxy-2'-fluoroguanosine
  modified_base (13)..(13): gm
  modified_base (14)..(14): 2'-deoxy-2'-fluoroguanosine
  modified_base (15)..(15): 2'-O-methyladenosine
  modified_base (16)..(16): 2'-deoxy-2'-fluorouridine
  modified_base (17)..(17): gm
  modified_base (18)..(18): 2'-deoxy-2'-fluoroadenosine
  modified_base (19)..(19): gm
  modified_base (20)..(20): 2'-deoxy-2'-fluoroadenosine
  modified_base (21)..(21): 2'-O-methyladenosine
ugucccgaggagggaugagaa

SEQ ID NO: 5541 - RNA, 21 nt, Artificial Sequence
  siRNA sense strand against b2GPI
  modified_base (1)..(1): 2'-deoxy-2'-fluorocytidine
  modified_base (2)..(2): cm
  misc_feature (2)..(3): 5'-phosphonothioate
  modified_base (3)..(3): 2'-deoxy-2'-fluorocytidine
  modified_base (4)..(4): gm
  modified_base (5)..(5): 2'-deoxy-2'-fluoroadenosine
  modified_base (6)..(6): gm
  modified_base (7)..(7): 2'-deoxy-2'-fluoroguanosine
  modified_base (8)..(8): 2'-O-methyladenosine
  modified_base (9)..(9): 2'-deoxy-2'-fluoroguanosine
  modified_base (10)..(10): gm
  modified_base (11)..(11): 2'-deoxy-2'-fluoroguanosine
  modified_base (12)..(12): 2'-deoxy-2'-fluoroadenosine
  modified_base (13)..(13): um
  modified_base (14)..(14): 2'-deoxy-2'-fluoroguanosine
  modified_base (15)..(15): 2'-O-methyladenosine
  modified_base (16)..(16): 2'-deoxy-2'-fluoroguanosine
  modified_base (17)..(17): 2'-O-methyladenosine
  modified_base (18)..(18): 2'-deoxy-2'-fluoroadenosine
  modified_base (19)..(19): 2'-O-methyladenosine
  modified_base (20)..(20): 2'-deoxy-2'-fluoroguanosine
  modified_base (21)..(21): um
cccgaggagggaugagaaagu

SEQ ID NO: 5542 - RNA, 21 nt, Artificial Sequence
  siRNA sense strand against b2GPI
  modified_base (1)..(1): 2'-deoxy-2'-fluorocytidine
  modified_base (2)..(2): cm
  misc_feature (2)..(3): 5'-phosphonothioate
  modified_base (3)..(3): 2'-deoxy-2'-fluoroguanosine
  modified_base (4)..(4): 2'-O-methyladenosine
  modified_base (5)..(5): 2'-deoxy-2'-fluoroguanosine
  modified_base (6)..(6): gm
  modified_base (7)..(7): 2'-deoxy-2'-fluoroadenosine
  modified_base (8)..(8): gm
  modified_base (9)..(9): 2'-deoxy-2'-fluoroguanosine
  modified_base (10)..(10): gm
  modified_base (11)..(11): 2'-deoxy-2'-fluoroadenosine
  modified_base (12)..(12): 2'-deoxy-2'-fluorouridine
  modified_base (13)..(13): gm
  modified_base (14)..(14): 2'-deoxy-2'-fluoroadenosine
  modified_base (15)..(15): gm
  modified_base (16)..(16): 2'-deoxy-2'-fluoroadenosine
  modified_base (17)..(17): 2'-O-methyladenosine
  modified_base (18)..(18): 2'-deoxy-2'-fluoroadenosine
  modified_base (19)..(19): gm
  modified_base (20)..(20): 2'-deoxy-2'-fluorouridine
  modified_base (21)..(21): um
ccgaggagggaugagaaaguu

SEQ ID NO: 5543 - RNA, 21 nt, Artificial Sequence
  siRNA sense strand against b2GPI
  modified_base (1)..(1): 2'-deoxy-2'-fluorocytidine
  modified_base (2)..(2): gm
  misc_feature (2)..(3): 5'-phosphonothioate
  modified_base (3)..(3): 2'-deoxy-2'-fluoroadenosine
  modified_base (4)..(4): gm
  modified_base (5)..(5): 2'-deoxy-2'-fluoroguanosine
  modified_base (6)..(6): 2'-O-methyladenosine
  modified_base (7)..(7): 2'-deoxy-2'-fluoroguanosine
  modified_base (8)..(8): gm
  modified_base (9)..(9): 2'-deoxy-2'-fluoroguanosine
  modified_base (10)..(10): 2'-O-methyladenosine
  modified_base (11)..(11): 2'-deoxy-2'-fluorouridine
  modified_base (12)..(12): 2'-deoxy-2'-fluoroguanosine
  modified_base (13)..(13): 2'-O-methyladenosine
  modified_base (14)..(14): 2'-deoxy-2'-fluoroguanosine
  modified_base (15)..(15): 2'-O-methyladenosine
  modified_base (16)..(16): 2'-deoxy-2'-fluoroadenosine
  modified_base (17)..(17): 2'-O-methyladenosine
  modified_base (18)..(18): 2'-deoxy-2'-fluoroguanosine
  modified_base (19)..(19): um
  modified_base (20)..(20): 2'-deoxy-2'-fluorouridine
  modified_base (21)..(21): um
cgaggagggaugagaaaguuu

SEQ ID NO: 5544 - RNA, 21 nt, Artificial Sequence
  siRNA sense strand against b2GPI
  modified_base (1)..(1): 2'-deoxy-2'-fluoroguanosine
  modified_base (2)..(2): 2'-O-methyladenosine
  misc_feature (2)..(3): 5'-phosphonothioate
  modified_base (3)..(3): 2'-deoxy-2'-fluoroguanosine
  modified_base (4)..(4): gm
  modified_base (5)..(5): 2'-deoxy-2'-fluoroadenosine
  modified_base (6)..(6): gm
  modified_base (7)..(7): 2'-deoxy-2'-fluoroguanosine
  modified_base (8)..(8): gm
  modified_base (9)..(9): 2'-deoxy-2'-fluoroadenosine
  modified_base (10)..(10): um
  modified_base (11)..(11): 2'-deoxy-2'-fluoroguanosine
  modified_base (12)..(12): 2'-deoxy-2'-fluoroadenosine
  modified_base (13)..(13): gm
  modified_base (14)..(14): 2'-deoxy-2'-fluoroadenosine
  modified_base (15)..(15): 2'-O-methyladenosine
  modified_base (16)..(16): 2'-deoxy-2'-fluoroadenosine
  modified_base (17)..(17): gm
  modified_base (18)..(18): 2'-deoxy-2'-fluorouridine
  modified_base (19)..(19): um
  modified_base (20)..(20): 2'-deoxy-2'-fluorouridine
  modified_base (21)..(21): 2'-O-methyladenosine
gaggagggaugagaaaguuua

SEQ ID NO: 5545 - RNA, 21 nt, Artificial Sequence
  siRNA sense strand against b2GPI
  modified_base (1)..(1): 2'-deoxy-2'-fluoroadenosine
  modified_base (2)..(2): gm
  misc_feature (2)..(3): 5'-phosphonothioate
  modified_base (3)..(3): 2'-deoxy-2'-fluoroguanosine
  modified_base (4)..(4): 2'-O-methyladenosine
  modified_base (5)..(5): 2'-deoxy-2'-fluoroguanosine
  modified_base (6)..(6): gm
  modified_base (7)..(7): 2'-deoxy-2'-fluoroguanosine
  modified_base (8)..(8): 2'-O-methyladenosine
  modified_base (9)..(9): 2'-deoxy-2'-fluorouridine
  modified_base (10)..(10): gm
  modified_base (11)..(11): 2'-deoxy-2'-fluoroadenosine
  modified_base (12)..(12): 2'-deoxy-2'-fluoroguanosine
  modified_base (13)..(13): 2'-O-methyladenosine
  modified_base (14)..(14): 2'-deoxy-2'-fluoroadenosine
  modified_base (15)..(15): 2'-O-methyladenosine
  modified_base (16)..(16): 2'-deoxy-2'-fluoroguanosine
  modified_base (17)..(17): um
  modified_base (18)..(18): 2'-deoxy-2'-fluorouridine
  modified_base (19)..(19): um
  modified_base (20)..(20): 2'-deoxy-2'-fluoroadenosine
  modified_base (21)..(21): um
aggagggaugagaaaguuuau

SEQ ID NO: 5546 - RNA, 21 nt, Artificial Sequence
  siRNA sense strand against b2GPI
  modified_base (1)..(1): 2'-deoxy-2'-fluoroguanosine
  modified_base (2)..(2): gm
  misc_feature (2)..(3): 5'-phosphonothioate
  modified_base (3)..(3): 2'-deoxy-2'-fluoroadenosine
  modified_base (4)..(4): gm
  modified_base (5)..(5): 2'-deoxy-2'-fluoroguanosine
  modified_base (6)..(6): gm
  modified_base (7)..(7): 2'-deoxy-2'-fluoroadenosine
  modified_base (8)..(8): um
  modified_base (9)..(9): 2'-deoxy-2'-fluoroguanosine
  modified_base (10)..(10): 2'-O-methyladenosine
  modified_base (11)..(11): 2'-deoxy-2'-fluoroguanosine
  modified_base (12)..(12): 2'-deoxy-2'-fluoroadenosine
  modified_base (13)..(13): 2'-O-methyladenosine
  modified_base (14)..(14): 2'-deoxy-2'-fluoroadenosine
  modified_base (15)..(15): gm
  modified_base (16)..(16): 2'-deoxy-2'-fluorouridine
  modified_base (17)..(17): um
  modified_base (18)..(18): 2'-deoxy-2'-fluorouridine
  modified_base (19)..(19): 2'-O-methyladenosine
  modified_base (20)..(20): 2'-deoxy-2'-fluorouridine
  modified_base (21)..(21): cm
ggagggaugagaaaguuuauc

SEQ ID NO: 5547 - RNA, 21 nt, Artificial Sequence
  siRNA sense strand against b2GPI
  modified_base (1)..(1): 2'-deoxy-2'-fluoroguanosine
  modified_base (2)..(2): 2'-O-methyladenosine
  misc_feature (2)..(3): 5'-phosphonothioate
  modified_base (3)..(3): 2'-deoxy-2'-fluoroguanosine
  modified_base (4)..(4): gm
  modified_base (5)..(5): 2'-deoxy-2'-fluoroguanosine
  modified_base (6)..(6): 2'-O-methyladenosine
  modified_base (7)..(7): 2'-deoxy-2'-fluorouridine
  modified_base (8)..(8): gm
  modified_base (9)..(9): 2'-deoxy-2'-fluoroadenosine
  modified_base (10)..(10): gm
  modified_base (11)..(11): 2'-deoxy-2'-fluoroadenosine
  modified_base (12)..(12): 2'-deoxy-2'-fluoroadenosine
  modified_base (13)..(13): 2'-O-methyladenosine
  modified_base (14)..(14): 2'-deoxy-2'-fluoroguanosine
  modified_base (15)..(15): um
  modified_base (16)..(16): 2'-deoxy-2'-fluorouridine
  modified_base (17)..(17): um
  modified_base (18)..(18): 2'-deoxy-2'-fluoroadenosine
  modified_base (19)..(19): um
  modified_base (20)..(20): 2'-deoxy-2'-fluorocytidine
  modified_base (21)..(21): um
gagggaugagaaaguuuaucu

SEQ ID NO: 5548 - RNA, 21 nt, Artificial Sequence
  siRNA sense strand against b2GPI
  modified_base (1)..(1): 2'-deoxy-2'-fluoroadenosine
  modified_base (2)..(2): gm
  misc_feature (2)..(3): 5'-phosphonothioate
  modified_base (3)..(3): 2'-deoxy-2'-fluoroguanosine
  modified_base (4)..(4): gm
  modified_base (5)..(5): 2'-deoxy-2'-fluoroadenosine
  modified_base (6)..(6): um
  modified_base (7)..(7): 2'-deoxy-2'-fluoroguanosine
  modified_base (8)..(8): 2'-O-methyladenosine
  modified_base (9)..(9): 2'-deoxy-2'-fluoroguanosine
  modified_base (10)..(10): 2'-O-methyladenosine
  modified_base (11)..(11): 2'-deoxy-2'-fluoroadenosine
  modified_base (12)..(12): 2'-deoxy-2'-fluoroadenosine
  modified_base (13)..(13): gm
  modified_base (14)..(14): 2'-deoxy-2'-fluorouridine
  modified_base (15)..(15): um
  modified_base (16)..(16): 2'-deoxy-2'-fluorouridine
  modified_base (17)..(17): 2'-O-methyladenosine
  modified_base (18)..(18): 2'-deoxy-2'-fluorouridine
  modified_base (19)..(19): cm
  modified_base (20)..(20): 2'-deoxy-2'-fluorouridine
  modified_base (21)..(21): gm
agggaugagaaaguuuaucug

SEQ ID NO: 5549 - RNA, 21 nt, Artificial Sequence
  siRNA sense strand against b2GPI
  modified_base (1)..(1): 2'-deoxy-2'-fluoroguanosine
  modified_base (2)..(2): 2'-O-methyladenosine
  misc_feature (2)..(3): 5'-phosphonothioate
  modified_base (3)..(3): 2'-deoxy-2'-fluoroguanosine
  modified_base (4)..(4): 2'-O-methyladenosine
  modified_base (5)..(5): 2'-deoxy-2'-fluoroadenosine
  modified_base (6)..(6): 2'-O-methyladenosine
  modified_base (7)..(7): 2'-deoxy-2'-fluoroguanosine
  modified_base (8)..(8): um
  modified_base (9)..(9): 2'-deoxy-2'-fluorouridine
  modified_base (10)..(10): um
  modified_base (11)..(11): 2'-deoxy-2'-fluoroadenosine
  modified_base (12)..(12): 2'-deoxy-2'-fluorouridine
  modified_base (13)..(13): cm
  modified_base (14)..(14): 2'-deoxy-2'-fluorouridine
  modified_base (15)..(15): gm
  modified_base (16)..(16): 2'-deoxy-2'-fluorocytidine
  modified_base (17)..(17): cm
  modified_base (18)..(18): 2'-deoxy-2'-fluorocytidine
  modified_base (19)..(19): um
  modified_base (20)..(20): 2'-deoxy-2'-fluorocytidine
  modified_base (21)..(21): um
gagaaaguuuaucugcccucu

SEQ ID NO: 5550 - RNA, 21 nt, Artificial Sequence
  siRNA sense strand against b2GPI
  modified_base (1)..(1): 2'-deoxy-2'-fluoroguanosine
  modified_base (2)..(2): 2'-O-methyladenosine
  misc_feature (2)..(3): 5'-phosphonothioate
  modified_base (3)..(3): 2'-deoxy-2'-fluoroadenosine
  modified_base (4)..(4): 2'-O-methyladenosine
  modified_base (5)..(5): 2'-deoxy-2'-fluoroguanosine
  modified_base (6)..(6): um
  modified_base (7)..(7): 2'-deoxy-2'-fluorouridine
  modified_base (8)..(8): um
  modified_base (9)..(9): 2'-deoxy-2'-fluoroadenosine
  modified_base (10)..(10): um
  modified_base (11)..(11): 2'-deoxy-2'-fluorocytidine
  modified_base (12)..(12): 2'-deoxy-2'-fluorouridine
  modified_base (13)..(13): gm
  modified_base (14)..(14): 2'-deoxy-2'-fluorocytidine
  modified_base (15)..(15): cm
  modified_base (16)..(16): 2'-deoxy-2'-fluorocytidine
  modified_base (17)..(17): um
  modified_base (18)..(18): 2'-deoxy-2'-fluorocytidine
  modified_base (19)..(19): um
  modified_base (20)..(20): 2'-deoxy-2'-fluorocytidine
  modified_base (21)..(21): 2'-O-methyladenosine
gaaaguuuaucugcccucuca

SEQ ID NO: 5551 - RNA, 21 nt, Artificial Sequence
  siRNA sense strand against b2GPI
  modified_base (1)..(1): 2'-deoxy-2'-fluorouridine
  modified_base (2)..(2): gm
  misc_feature (2)..(3): 5'-phosphonothioate
  modified_base (3)..(3): 2'-deoxy-2'-fluorocytidine
  modified_base (4)..(4): cm
  modified_base (5)..(5): 2'-deoxy-2'-fluorocytidine
  modified_base (6)..(6): um
  modified_base (7)..(7): 2'-deoxy-2'-fluorocytidine
  modified_base (8)..(8): um
  modified_base (9)..(9): 2'-deoxy-2'-fluorocytidine
  modified_base (10)..(10): 2'-O-methyladenosine
  modified_base (11)..(11): 2'-deoxy-2'-fluorocytidine
  modified_base (12)..(12): 2'-deoxy-2'-fluoroadenosine
  modified_base (13)..(13): gm
  modified_base (14)..(14): 2'-deoxy-2'-fluoroguanosine
  modified_base (15)..(15): 2'-O-methyladenosine
  modified_base (16)..(16): 2'-deoxy-2'-fluorocytidine
  modified_base (17)..(17): um
  modified_base (18)..(18): 2'-deoxy-2'-fluoroguanosine
  modified_base (19)..(19): um
  modified_base (20)..(20): 2'-deoxy-2'-fluoroguanosine
  modified_base (21)..(21): gm
ugcccucucacaggacugugg

SEQ ID NO: 5552 - RNA, 21 nt, Artificial Sequence
  siRNA sense strand against b2GPI
  modified_base (1)..(1): 2'-deoxy-2'-fluorouridine
  modified_base (2)..(2): cm
  misc_feature (2)..(3): 5'-phosphonothioate
  modified_base (3)..(3): 2'-deoxy-2'-fluorouridine
  modified_base (4)..(4): cm
  modified_base (5)..(5): 2'-deoxy-2'-fluoroadenosine
  modified_base (6)..(6): cm
  modified_base (7)..(7): 2'-deoxy-2'-fluoroadenosine
  modified_base (8)..(8): gm
  modified_base (9)..(9): 2'-deoxy-2'-fluoroguanosine
  modified_base (10)..(10): 2'-O-methyladenosine
  modified_base (11)..(11): 2'-deoxy-2'-fluorocytidine
  modified_base (12)..(12): 2'-deoxy-2'-fluorouridine
  modified_base (13)..(13): gm
  modified_base (14)..(14): 2'-deoxy-2'-fluorouridine
  modified_base (15)..(15): gm
  modified_base (16)..(16): 2'-deoxy-2'-fluoroguanosine
  modified_base (17)..(17): cm
  modified_base (18)..(18): 2'-deoxy-2'-fluorocytidine
  modified_base (19)..(19): cm
  modified_base (20)..(20): 2'-deoxy-2'-fluoroadenosine
  modified_base (21)..(21): um
ucucacaggacuguggcccau

SEQ ID NO: 5553 - RNA, 21 nt, Artificial Sequence
  siRNA sense strand against b2GPI
  modified_base (1)..(1): 2'-deoxy-2'-fluorouridine
  modified_base (2)..(2): cm
  misc_feature (2)..(3): 5'-phosphonothioate
  modified_base (3)..(3): 2'-deoxy-2'-fluoroadenosine
  modified_base (4)..(4): cm
  modified_base (5)..(5): 2'-deoxy-2'-fluoroadenosine
  modified_base (6)..(6): gm
  modified_base (7)..(7): 2'-deoxy-2'-fluoroguanosine
  modified_base (8)..(8): 2'-O-methyladenosine
  modified_base (9)..(9): 2'-deoxy-2'-fluorocytidine
  modified_base (10)..(10): um
  modified_base (11)..(11): 2'-deoxy-2'-fluoroguanosine
  modified_base (12)..(12): 2'-deoxy-2'-fluorouridine
  modified_base (13)..(13): gm
  modified_base (14)..(14): 2'-deoxy-2'-fluoroguanosine
  modified_base (15)..(15): cm
  modified_base (16)..(16): 2'-deoxy-2'-fluorocytidine
  modified_base (17)..(17): cm
  modified_base (18)..(18): 2'-deoxy-2'-fluoroadenosine
  modified_base (19)..(19): um
  modified_base (20)..(20): 2'-deoxy-2'-fluorocytidine
  modified_base (21)..(21): 2'-O-methyladenosine
ucacaggacuguggcccauca

SEQ ID NO: 5554 - RNA, 21 nt, Artificial Sequence
  siRNA sense strand against b2GPI
  modified_base (1)..(1): 2'-deoxy-2'-fluorocytidine
  modified_base (2)..(2): 2'-O-methyladenosine
  misc_feature (2)..(3): 5'-phosphonothioate
  modified_base (3)..(3): 2'-deoxy-2'-fluoroguanosine
  modified_base (4)..(4): gm
  modified_base (5)..(5): 2'-deoxy-2'-fluoroadenosine
  modified_base (6)..(6): cm
  modified_base (7)..(7): 2'-deoxy-2'-fluorouridine
  modified_base (8)..(8): gm
  modified_base (9)..(9): 2'-deoxy-2'-fluorouridine
  modified_base (10)..(10): gm
  modified_base (11)..(11): 2'-deoxy-2'-fluoroguanosine
  modified_base (12)..(12): 2'-deoxy-2'-fluorocytidine
  modified_base (13)..(13): cm
  modified_base (14)..(14): 2'-deoxy-2'-fluorocytidine
  modified_base (15)..(15): 2'-O-methyladenosine
  modified_base (16)..(16): 2'-deoxy-2'-fluorouridine
  modified_base (17)..(17): cm
  modified_base (18)..(18): 2'-deoxy-2'-fluoroadenosine
  modified_base (19)..(19): 2'-O-methyladenosine
  modified_base (20)..(20): 2'-deoxy-2'-fluorocytidine
  modified_base (21)..(21): 2'-O-methyladenosine
caggacuguggcccaucaaca

SEQ ID NO: 5555 - RNA, 21 nt, Artificial Sequence
  siRNA sense strand against b2GPI
  modified_base (1)..(1): 2'-deoxy-2'-fluoroadenosine
  modified_base (2)..(2): gm
  misc_feature (2)..(3): 5'-phosphonothioate
  modified_base (3)..(3): 2'-deoxy-2'-fluoroguanosine
  modified_base (4)..(4): 2'-O-methyladenosine
  modified_base (5)..(5): 2'-deoxy-2'-fluorocytidine
  modified_base (6)..(6): um
  modified_base (7)..(7): 2'-deoxy-2'-fluoroguanosine
  modified_base (8)..(8): um
  modified_base (9)..(9): 2'-deoxy-2'-fluoroguanosine
  modified_base (10)..(10): gm
  modified_base (11)..(11): 2'-deoxy-2'-fluorocytidine
  modified_base (12)..(12): 2'-deoxy-2'-fluorocytidine
  modified_base (13)..(13): cm
  modified_base (14)..(14): 2'-deoxy-2'-fluoroadenosine
  modified_base (15)..(15): um
  modified_base (16)..(16): 2'-deoxy-2'-fluorocytidine
  modified_base (17)..(17): 2'-O-methyladenosine
  modified_base (18)..(18): 2'-deoxy-2'-fluoroadenosine
  modified_base (19)..(19): cm
  modified_base (20)..(20): 2'-deoxy-2'-fluoroadenosine
  modified_base (21)..(21): cm
aggacuguggcccaucaacac

SEQ ID NO: 5556 - RNA, 21 nt, Artificial Sequence
  siRNA sense strand against b2GPI
  modified_base (1)..(1): 2'-deoxy-2'-fluoroguanosine
  modified_base (2)..(2): um
  misc_feature (2)..(3): 5'-phosphonothioate
  modified_base (3)..(3): 2'-deoxy-2'-fluoroguanosine
  modified_base (4)..(4): gm
  modified_base (5)..(5): 2'-deoxy-2'-fluorocytidine
  modified_base (6)..(6): cm
  modified_base (7)..(7): 2'-deoxy-2'-fluorocytidine
  modified_base (8)..(8): 2'-O-methyladenosine
  modified_base (9)..(9): 2'-deoxy-2'-fluorouridine
  modified_base (10)..(10): cm
  modified_base (11)..(11): 2'-deoxy-2'-fluoroadenosine
  modified_base (12)..(12): 2'-deoxy-2'-fluoroadenosine
  modified_base (13)..(13): cm
  modified_base (14)..(14): 2'-deoxy-2'-fluoroadenosine
  modified_base (15)..(15): cm
  modified_base (16)..(16): 2'-deoxy-2'-fluorouridine
  modified_base (17)..(17): cm
  modified_base (18)..(18): 2'-deoxy-2'-fluorouridine
  modified_base (19)..(19): gm
  modified_base (20)..(20): 2'-deoxy-2'-fluoroadenosine
  modified_base (21)..(21): 2'-O-methyladenosine
guggcccaucaacacucugaa

SEQ ID NO: 5557 - RNA, 21 nt, Artificial Sequence
  siRNA sense strand against b2GPI
  modified_base (1)..(1): 2'-deoxy-2'-fluoroguanosine
  modified_base (2)..(2): gm
  misc_feature (2)..(3): 5'-phosphonothioate
  modified_base (3)..(3): 2'-deoxy-2'-fluorocytidine
  modified_base (4)..(4): cm
  modified_base (5)..(5): 2'-deoxy-2'-fluorocytidine
  modified_base (6)..(6): 2'-O-methyladenosine
  modified_base (7)..(7): 2'-deoxy-2'-fluorouridine
  modified_base (8)..(8): cm
  modified_base (9)..(9): 2'-deoxy-2'-fluoroadenosine
  modified_base (10)..(10): 2'-O-methyladenosine
  modified_base (11)..(11): 2'-deoxy-2'-fluorocytidine
  modified_base (12)..(12): 2'-deoxy-2'-fluoroadenosine
  modified_base (13)..(13): cm
  modified_base (14)..(14): 2'-deoxy-2'-fluorouridine
  modified_base (15)..(15): cm
  modified_base (16)..(16): 2'-deoxy-2'-fluorouridine
  modified_base (17)..(17): gm
  modified_base (18)..(18): 2'-deoxy-2'-fluoroadenosine
  modified_base (19)..(19): 2'-O-methyladenosine
  modified_base (20)..(20): 2'-deoxy-2'-fluoroadenosine
  modified_base (21)..(21): um
ggcccaucaacacucugaaau

SEQ ID NO: 5558 - RNA, 21 nt, Artificial Sequence
  siRNA sense strand against b2GPI
  modified_base (1)..(1): 2'-deoxy-2'-fluoroguanosine
  modified_base (2)..(2): cm
  misc_feature (2)..(3): 5'-phosphonothioate
  modified_base (3)..(3): 2'-deoxy-2'-fluorocytidine
  modified_base (4)..(4): cm
  modified_base (5)..(5): 2'-deoxy-2'-fluoroadenosine
  modified_base (6)..(6): um
  modified_base (7)..(7): 2'-deoxy-2'-fluorocytidine
  modified_base (8)..(8): 2'-O-methyladenosine
  modified_base (9)..(9): 2'-deoxy-2'-fluoroadenosine
  modified_base (10)..(10): cm
  modified_base (11)..(11): 2'-deoxy-2'-fluoroadenosine
  modified_base (12)..(12): 2'-deoxy-2'-fluorocytidine
  modified_base (13)..(13): um
  modified_base (14)..(14): 2'-deoxy-2'-fluorocytidine
  modified_base (15)..(15): um
  modified_base (16)..(16): 2'-deoxy-2'-fluoroguanosine
  modified_base (17)..(17): 2'-O-methyladenosine
  modified_base (18)..(18): 2'-deoxy-2'-fluoroadenosine
  modified_base (19)..(19): 2'-O-methyladenosine
  modified_base (20)..(20): 2'-deoxy-2'-fluorouridine
  modified_base (21)..(21): gm
gcccaucaacacucugaaaug

SEQ ID NO: 5559 - RNA, 21 nt, Artificial Sequence
  siRNA sense strand against b2GPI
  modified_base (1)..(1): 2'-deoxy-2'-fluorocytidine
  modified_base (2)..(2): cm
  misc_feature (2)..(3): 5'-phosphonothioate
  modified_base (3)..(3): 2'-deoxy-2'-fluorocytidine
  modified_base (4)..(4): 2'-O-methyladenosine
  modified_base (5)..(5): 2'-deoxy-2'-fluorouridine
  modified_base (6)..(6): cm
  modified_base (7)..(7): 2'-deoxy-2'-fluoroadenosine
  modified_base (8)..(8): 2'-O-methyladenosine
  modified_base (9)..(9): 2'-deoxy-2'-fluorocytidine
  modified_base (10)..(10): 2'-O-methyladenosine
  modified_base (11)..(11): 2'-deoxy-2'-fluorocytidine
  modified_base (12)..(12): 2'-deoxy-2'-fluorouridine
  modified_base (13)..(13): cm
  modified_base (14)..(14): 2'-deoxy-2'-fluorouridine
  modified_base (15)..(15): gm
  modified_base (16)..(16): 2'-deoxy-2'-fluoroadenosine
  modified_base (17)..(17): 2'-O-methyladenosine
  modified_base (18)..(18): 2'-deoxy-2'-fluoroadenosine
  modified_base (19)..(19): um
  modified_base (20)..(20): 2'-deoxy-2'-fluoroguanosine
  modified_base (21)..(21): um
cccaucaacacucugaaaugu

SEQ ID NO: 5560 - RNA, 21 nt, Artificial Sequence
  siRNA sense strand against b2GPI
  modified_base (1)..(1): 2'-deoxy-2'-fluorocytidine
  modified_base (2)..(2): cm
  misc_feature (2)..(3): 5'-phosphonothioate
  modified_base (3)..(3): 2'-deoxy-2'-fluoroadenosine
  modified_base (4)..(4): um
  modified_base (5)..(5): 2'-deoxy-2'-fluorocytidine
  modified_base (6)..(6): 2'-O-methyladenosine
  modified_base (7)..(7): 2'-deoxy-2'-fluoroadenosine
  modified_base (8)..(8): cm
  modified_base (9)..(9): 2'-deoxy-2'-fluoroadenosine
  modified_base (10)..(10): cm
  modified_base (11)..(11): 2'-deoxy-2'-fluorouridine
  modified_base (12)..(12): 2'-deoxy-2'-fluorocytidine
  modified_base (13)..(13): um
  modified_base (14)..(14): 2'-deoxy-2'-fluoroguanosine
  modified_base (15)..(15): 2'-O-methyladenosine
  modified_base (16)..(16): 2'-deoxy-2'-fluoroadenosine
  modified_base (17)..(17): 2'-O-methyladenosine
  modified_base (18)..(18): 2'-deoxy-2'-fluorouridine
  modified_base (19)..(19): gm
  modified_base (20)..(20): 2'-deoxy-2'-fluorouridine
  modified_base (21)..(21): 2'-O-methyladenosine
ccaucaacacucugaaaugua

SEQ ID NO: 5561 - RNA, 21 nt, Artificial Sequence
  siRNA sense strand against b2GPI
  modified_base (1)..(1): 2'-deoxy-2'-fluoroadenosine
  modified_base (2)..(2): um
  misc_feature (2)..(3): 5'-phosphonothioate
  modified_base (3)..(3): 2'-deoxy-2'-fluorocytidine
  modified_base (4)..(4): 2'-O-methyladenosine
  modified_base (5)..(5): 2'-deoxy-2'-fluoroadenosine
  modified_base (6)..(6): cm
  modified_base (7)..(7): 2'-deoxy-2'-fluoroadenosine
  modified_base (8)..(8): cm
  modified_base (9)..(9): 2'-deoxy-2'-fluorouridine
  modified_base (10)..(10): cm
  modified_base (11)..(11): 2'-deoxy-2'-fluorouridine
  modified_base (12)..(12): 2'-deoxy-2'-fluoroguanosine
  modified_base (13)..(13): 2'-O-methyladenosine
  modified_base (14)..(14): 2'-deoxy-2'-fluoroadenosine
  modified_base (15)..(15): 2'-O-methyladenosine
  modified_base (16)..(16): 2'-deoxy-2'-fluorouridine
  modified_base (17)..(17): gm
  modified_base (18)..(18): 2'-deoxy-2'-fluorouridine
  modified_base (19)..(19): 2'-O-methyladenosine
  modified_base (20)..(20): 2'-deoxy-2'-fluorocytidine
  modified_base (21)..(21): 2'-O-methyladenosine
aucaacacucugaaauguaca

SEQ ID NO: 5562 - RNA, 21 nt, Artificial Sequence
  siRNA sense strand against b2GPI
  modified_base (1)..(1): 2'-deoxy-2'-fluoroadenosine
  modified_base (2)..(2): cm
  misc_feature (2)..(3): 5'-phosphonothioate
  modified_base (3)..(3): 2'-deoxy-2'-fluoroadenosine
  modified_base (4)..(4): cm
  modified_base (5)..(5): 2'-deoxy-2'-fluorouridine
  modified_base (6)..(6): cm
  modified_base (7)..(7): 2'-deoxy-2'-fluorouridine
  modified_base (8)..(8): gm
  modified_base (9)..(9): 2'-deoxy-2'-fluoroadenosine
  modified_base (10)..(10): 2'-O-methyladenosine
  modified_base (11)..(11): 2'-deoxy-2'-fluoroadenosine
  modified_base (12)..(12): 2'-deoxy-2'-fluorouridine
  modified_base (13)..(13): gm
  modified_base (14)..(14): 2'-deoxy-2'-fluorouridine
  modified_base (15)..(15): 2'-O-methyladenosine
  modified_base (16)..(16): 2'-deoxy-2'-fluorocytidine
  modified_base (17)..(17): 2'-O-methyladenosine
  modified_base (18)..(18): 2'-deoxy-2'-fluorocytidine
  modified_base (19)..(19): cm
  modified_base (20)..(20): 2'-deoxy-2'-fluorocytidine
  modified_base (21)..(21): 2'-O-methyladenosine
acacucugaaauguacaccca

SEQ ID NO: 5563 - RNA, 21 nt, Artificial Sequence
  siRNA sense strand against b2GPI
  modified_base (1)..(1): 2'-deoxy-2'-fluoroadenosine
  modified_base (2)..(2): cm
  misc_feature (2)..(3): 5'-phosphonothioate
  modified_base (3)..(3): 2'-deoxy-2'-fluorouridine
  modified_base (4)..(4): cm
  modified_base (5)..(5): 2'-deoxy-2'-fluorouridine
  modified_base (6)..(6): gm
  modified_base (7)..(7): 2'-deoxy-2'-fluoroadenosine
  modified_base (8)..(8): 2'-O-methyladenosine
  modified_base (9)..(9): 2'-deoxy-2'-fluoroadenosine
  modified_base (10)..(10): um
  modified_base (11)..(11): 2'-deoxy-2'-fluoroguanosine
  modified_base (12)..(12): 2'-deoxy-2'-fluorouridine
  modified_base (13)..(13): 2'-O-methyladenosine
  modified_base (14)..(14): 2'-deoxy-2'-fluorocytidine
  modified_base (15)..(15): 2'-O-methyladenosine
  modified_base (16)..(16): 2'-deoxy-2'-fluorocytidine
  modified_base (17)..(17): cm
  modified_base (18)..(18): 2'-deoxy-2'-fluorocytidine
  modified_base (19)..(19): 2'-O-methyladenosine
  modified_base (20)..(20): 2'-deoxy-2'-fluoroguanosine
  modified_base (21)..(21): 2'-O-methyladenosine
acucugaaauguacacccaga

SEQ ID NO: 5564 - RNA, 21 nt, Artificial Sequence
  siRNA sense strand against b2GPI
  modified_base (1)..(1): 2'-deoxy-2'-fluorocytidine
  modified_base (2)..(2): um
  misc_feature (2)..(3): 5'-phosphonothioate
  modified_base (3)..(3): 2'-deoxy-2'-fluoroguanosine
  modified_base (4)..(4): 2'-O-methyladenosine
  modified_base (5)..(5): 2'-deoxy-2'-fluoroadenosine
  modified_base (6)..(6): 2'-O-methyladenosine
  modified_base (7)..(7): 2'-deoxy-2'-fluorouridine
  modified_base (8)..(8): gm
  modified_base (9)..(9): 2'-deoxy-2'-fluorouridine
  modified_base (10)..(10): 2'-O-methyladenosine
  modified_base (11)..(11): 2'-deoxy-2'-fluorocytidine
  modified_base (12)..(12): 2'-deoxy-2'-fluoroadenosine
  modified_base (13)..(13): cm
  modified_base (14)..(14): 2'-deoxy-2'-fluorocytidine
  modified_base (15)..(15): cm
  modified_base (16)..(16): 2'-deoxy-2'-fluoroadenosine
  modified_base (17)..(17): gm
  modified_base (18)..(18): 2'-deoxy-2'-fluoroadenosine
  modified_base (19)..(19): gm
  modified_base (20)..(20): 2'-deoxy-2'-fluorouridine
  modified_base (21)..(21): 2'-O-methyladenosine
cugaaauguacacccagagua

SEQ ID NO: 5565 - RNA, 21 nt, Artificial Sequence
  siRNA sense strand against b2GPI
  modified_base (1)..(1): 2'-deoxy-2'-fluorouridine
  modified_base (2)..(2): gm
  misc_feature (2)..(3): 5'-phosphonothioate
  modified_base (3)..(3): 2'-deoxy-2'-fluoroadenosine
  modified_base (4)..(4): 2'-O-methyladenosine
  modified_base (5)..(5): 2'-deoxy-2'-fluoroadenosine
  modified_base (6)..(6): um
  modified_base (7)..(7): 2'-deoxy-2'-fluoroguanosine
  modified_base (8)..(8): um
  modified_base (9)..(9): 2'-deoxy-2'-fluoroadenosine
  modified_base (10)..(10): cm
  modified_base (11)..(11): 2'-deoxy-2'-fluoroadenosine
  modified_base (12)..(12): 2'-deoxy-2'-fluorocytidine
  modified_base (13)..(13): cm
  modified_base (14)..(14): 2'-deoxy-2'-fluorocytidine
  modified_base (15)..(15): 2'-O-methyladenosine
  modified_base (16)..(16): 2'-deoxy-2'-fluoroguanosine
  modified_base (17)..(17): 2'-O-methyladenosine
  modified_base (18)..(18): 2'-deoxy-2'-fluoroguanosine
  modified_base (19)..(19): um
  modified_base (20)..(20): 2'-deoxy-2'-fluoroadenosine
  modified_base (21)..(21): um
ugaaauguacacccagaguau

SEQ ID NO: 5566 - RNA, 21 nt, Artificial Sequence
  siRNA sense strand against b2GPI
  modified_base (1)..(1): 2'-deoxy-2'-fluoroadenosine
  modified_base (2)..(2): 2'-O-methyladenosine
  misc_feature (2)..(3): 5'-phosphonothioate
  modified_base (3)..(3): 2'-deoxy-2'-fluoroadenosine
  modified_base (4)..(4): um
  modified_base (5)..(5): 2'-deoxy-2'-fluoroguanosine
  modified_base (6)..(6): um
  modified_base (7)..(7): 2'-deoxy-2'-fluoroadenosine
  modified_base (8)..(8): cm
  modified_base (9)..(9): 2'-deoxy-2'-fluoroadenosine
  modified_base (10)..(10): cm
  modified_base (11)..(11): 2'-deoxy-2'-fluorocytidine
  modified_base (12)..(12): 2'-deoxy-2'-fluorocytidine
  modified_base (13)..(13): 2'-O-methyladenosine
  modified_base (14)..(14): 2'-deoxy-2'-fluoroguanosine
  modified_base (15)..(15): 2'-O-methyladenosine
  modified_base (16)..(16): 2'-deoxy-2'-fluoroguanosine
  modified_base (17)..(17): um
  modified_base (18)..(18): 2'-deoxy-2'-fluoroadenosine
  modified_base (19)..(19): um
  modified_base (20)..(20): 2'-deoxy-2'-fluoroguanosine
  modified_base (21)..(21): um
aaauguacacccagaguaugu

SEQ ID NO: 5567 - RNA, 21 nt, Artificial Sequence
  siRNA sense strand against b2GPI
  modified_base (1)..(1): 2'-deoxy-2'-fluorouridine
  modified_base (2)..(2): gm
  misc_feature (2)..(3): 5'-phosphonothioate
  modified_base (3)..(3): 2'-deoxy-2'-fluorouridine
  modified_base (4)..(4): 2'-O-methyladenosine
  modified_base (5)..(5): 2'-deoxy-2'-fluorocytidine
  modified_base (6)..(6): 2'-O-methyladenosine
  modified_base (7)..(7): 2'-deoxy-2'-fluorocytidine
  modified_base (8)..(8): cm
  modified_base (9)..(9): 2'-deoxy-2'-fluorocytidine
  modified_base (10)..(10): 2'-O-methyladenosine
  modified_base (11)..(11): 2'-deoxy-2'-fluoroguanosine
  modified_base (12)..(12): 2'-deoxy-2'-fluoroadenosine
  modified_base (13)..(13): gm
  modified_base (14)..(14): 2'-deoxy-2'-fluorouridine
  modified_base (15)..(15): 2'-O-methyladenosine
  modified_base (16)..(16): 2'-deoxy-2'-fluorouridine
  modified_base (17)..(17): gm
  modified_base (18)..(18): 2'-deoxy-2'-fluorouridine
  modified_base (19)..(19): cm
  modified_base (20)..(20): 2'-deoxy-2'-fluorocytidine
  modified_base (21)..(21): um
uguacacccagaguauguccu

SEQ ID NO: 5568 - RNA, 21 nt, Artificial Sequence
  siRNA sense strand against b2GPI
  modified_base (1)..(1): 2'-deoxy-2'-fluoroguanosine
  modified_base (2)..(2): um
  misc_feature (2)..(3): 5'-phosphonothioate
  modified_base (3)..(3): 2'-deoxy-2'-fluoroadenosine
  modified_base (4)..(4): cm
  modified_base (5)..(5): 2'-deoxy-2'-fluoroadenosine
  modified_base (6)..(6): cm
  modified_base (7)..(7): 2'-deoxy-2'-fluorocytidine
  modified_base (8)..(8): cm
  modified_base (9)..(9): 2'-deoxy-2'-fluoroadenosine
  modified_base (10)..(10): gm
  modified_base (11)..(11): 2'-deoxy-2'-fluoroadenosine
  modified_base (12)..(12): 2'-deoxy-2'-fluoroguanosine
  modified_base (13)..(13): um
  modified_base (14)..(14): 2'-deoxy-2'-fluoroadenosine
  modified_base (15)..(15): um
  modified_base (16)..(16): 2'-deoxy-2'-fluoroguanosine
  modified_base (17)..(17): um
  modified_base (18)..(18): 2'-deoxy-2'-fluorocytidine
  modified_base (19)..(19): cm
  modified_base (20)..(20): 2'-deoxy-2'-fluorouridine
  modified_base (21)..(21): um
guacacccagaguauguccuu

SEQ ID NO: 5569 - RNA, 21 nt, Artificial Sequence
  siRNA sense strand against b2GPI
  modified_base (1)..(1): 2'-deoxy-2'-fluorouridine
  modified_base (2)..(2): 2'-O-methyladenosine
  misc_feature (2)..(3): 5'-phosphonothioate
  modified_base (3)..(3): 2'-deoxy-2'-fluorocytidine
  modified_base (4)..(4): 2'-O-methyladenosine
  modified_base (5)..(5): 2'-deoxy-2'-fluorocytidine
  modified_base (6)..(6): cm
  modified_base (7)..(7): 2'-deoxy-2'-fluorocytidine
  modified_base (8)..(8): 2'-O-methyladenosine
  modified_base (9)..(9): 2'-deoxy-2'-fluoroguanosine
  modified_base (10)..(10): 2'-O-methyladenosine
  modified_base (11)..(11): 2'-deoxy-2'-fluoroguanosine
  modified_base (12)..(12): 2'-deoxy-2'-fluorouridine
  modified_base (13)..(13): 2'-O-methyladenosine
  modified_base (14)..(14): 2'-deoxy-2'-fluorouridine
  modified_base (15)..(15): gm
  modified_base (16)..(16): 2'-deoxy-2'-fluorouridine
  modified_base (17)..(17): cm
  modified_base (18)..(18): 2'-deoxy-2'-fluorocytidine
  modified_base (19)..(19): um
  modified_base (20)..(20): 2'-deoxy-2'-fluorouridine
  modified_base (21)..(21): um
uacacccagaguauguccuuu

SEQ ID NO: 5570 - RNA, 21 nt, Artificial Sequence
  siRNA sense strand against b2GPI
  modified_base (1)..(1): 2'-deoxy-2'-fluoroadenosine
  modified_base (2)..(2): cm
  misc_feature (2)..(3): 5'-phosphonothioate
  modified_base (3)..(3): 2'-deoxy-2'-fluoroadenosine
  modified_base (4)..(4): cm
  modified_base (5)..(5): 2'-deoxy-2'-fluorocytidine
  modified_base (6)..(6): cm
  modified_base (7)..(7): 2'-deoxy-2'-fluoroadenosine
  modified_base (8)..(8): gm
  modified_base (9)..(9): 2'-deoxy-2'-fluoroadenosine
  modified_base (10)..(10): gm
  modified_base (11)..(11): 2'-deoxy-2'-fluorouridine
  modified_base (12)..(12): 2'-deoxy-2'-fluoroadenosine
  modified_base (13)..(13): um
  modified_base (14)..(14): 2'-deoxy-2'-fluoroguanosine
  modified_base (15)..(15): um
  modified_base (16)..(16): 2'-deoxy-2'-fluorocytidine
  modified_base (17)..(17): cm
  modified_base (18)..(18): 2'-deoxy-2'-fluorouridine
  modified_base (19)..(19): um
  modified_base (20)..(20): 2'-deoxy-2'-fluorouridine
  modified_base (21)..(21): um
acacccagaguauguccuuuu

SEQ ID NO: 5571 - RNA, 21 nt, Artificial Sequence
  siRNA sense strand against b2GPI
  modified_base (1)..(1): 2'-deoxy-2'-fluorocytidine
  modified_base (2)..(2): 2'-O-methyladenosine
  misc_feature (2)..(3): 5'-phosphonothioate
  modified_base (3)..(3): 2'-deoxy-2'-fluorocytidine
  modified_base (4)..(4): cm
  modified_base (5)..(5): 2'-deoxy-2'-fluorocytidine
  modified_base (6)..(6): 2'-O-methyladenosine
  modified_base (7)..(7): 2'-deoxy-2'-fluoroguanosine
  modified_base (8)..(8): 2'-O-methyladenosine
  modified_base (9)..(9): 2'-deoxy-2'-fluoroguanosine
  modified_base (10)..(10): um
  modified_base (11)..(11): 2'-deoxy-2'-fluoroadenosine
  modified_base (12)..(12): 2'-deoxy-2'-fluorouridine
  modified_base (13)..(13): gm
  modified_base (14)..(14): 2'-deoxy-2'-fluorouridine
  modified_base (15)..(15): cm
  modified_base (16)..(16): 2'-deoxy-2'-fluorocytidine
  modified_base (17)..(17): um
  modified_base (18)..(18): 2'-deoxy-2'-fluorouridine
  modified_base (19)..(19): um
  modified_base (20)..(20): 2'-deoxy-2'-fluorouridine
  modified_base (21)..(21): gm
cacccagaguauguccuuuug

SEQ ID NO: 5572 - RNA, 21 nt, Artificial Sequence
  siRNA sense strand against b2GPI
  modified_base (1)..(1): 2'-deoxy-2'-fluorocytidine
  modified_base (2)..(2): cm
  misc_feature (2)..(3): 5'-phosphonothioate
  modified_base (3)..(3): 2'-deoxy-2'-fluorocytidine
  modified_base (4)..(4): 2'-O-methyladenosine
  modified_base (5)..(5): 2'-deoxy-2'-fluoroguanosine
  modified_base (6)..(6): 2'-O-methyladenosine
  modified_base (7)..(7): 2'-deoxy-2'-fluoroguanosine
  modified_base (8)..(8): um
  modified_base (9)..(9): 2'-deoxy-2'-fluoroadenosine
  modified_base (10)..(10): um
  modified_base (11)..(11): 2'-deoxy-2'-fluoroguanosine
  modified_base (12)..(12): 2'-deoxy-2'-fluorouridine
  modified_base (13)..(13): cm
  modified_base (14)..(14): 2'-deoxy-2'-fluorocytidine
  modified_base (15)..(15): um
  modified_base (16)..(16): 2'-deoxy-2'-fluorouridine
  modified_base (17)..(17): um
  modified_base (18)..(18): 2'-deoxy-2'-fluorouridine
  modified_base (19)..(19): gm
  modified_base (20)..(20): 2'-deoxy-2'-fluorocytidine
  modified_base (21)..(21): um
cccagaguauguccuuuugcu

SEQ ID NO: 5573 - RNA, 21 nt, Artificial Sequence
  siRNA sense strand against b2GPI
  modified_base (1)..(1): 2'-deoxy-2'-fluorocytidine
  modified_base (2)..(2): cm
  misc_feature (2)..(3): 5'-phosphonothioate
  modified_base (3)..(3): 2'-deoxy-2'-fluoroadenosine
  modified_base (4)..(4): gm
  modified_base (5)..(5): 2'-deoxy-2'-fluoroadenosine
  modified_base (6)..(6): gm
  modified_base (7)..(7): 2'-deoxy-2'-fluorouridine
  modified_base (8)..(8): 2'-O-methyladenosine
  modified_base (9)..(9): 2'-deoxy-2'-fluorouridine
  modified_base (10)..(10): gm
  modified_base (11)..(11): 2'-deoxy-2'-fluorouridine
  modified_base (12)..(12): 2'-deoxy-2'-fluorocytidine
  modified_base (13)..(13): cm
  modified_base (14)..(14): 2'-deoxy-2'-fluorouridine
  modified_base (15)..(15): um
  modified_base (16)..(16): 2'-deoxy-2'-fluorouridine
  modified_base (17)..(17): um
  modified_base (18)..(18): 2'-deoxy-2'-fluoroguanosine
  modified_base (19)..(19): cm
  modified_base (20)..(20): 2'-deoxy-2'-fluorouridine
  modified_base (21)..(21): gm
ccagaguauguccuuuugcug

SEQ ID NO: 5574 - RNA, 21 nt, Artificial Sequence
  siRNA sense strand against b2GPI
  modified_base (1)..(1): 2'-deoxy-2'-fluorocytidine
  modified_base (2)..(2): 2'-O-methyladenosine
  misc_feature (2)..(3): 5'-phosphonothioate
  modified_base (3)..(3): 2'-deoxy-2'-fluoroguanosine
  modified_base (4)..(4): 2'-O-methyladenosine
  modified_base (5)..(5): 2'-deoxy-2'-fluoroguanosine
  modified_base (6)..(6): um
  modified_base (7)..(7): 2'-deoxy-2'-fluoroadenosine
  modified_base (8)..(8): um
  modified_base (9)..(9): 2'-deoxy-2'-fluoroguanosine
  modified_base (10)..(10): um
  modified_base (11)..(11): 2'-deoxy-2'-fluorocytidine
  modified_base (12)..(12): 2'-deoxy-2'-fluorocytidine
  modified_base (13)..(13): um
  modified_base (14)..(14): 2'-deoxy-2'-fluorouridine
  modified_base (15)..(15): um
  modified_base (16)..(16): 2'-deoxy-2'-fluorouridine
  modified_base (17)..(17): gm
  modified_base (18)..(18): 2'-deoxy-2'-fluorocytidine
  modified_base (19)..(19): um
  modified_base (20)..(20): 2'-deoxy-2'-fluoroguanosine
  modified_base (21)..(21): gm
cagaguauguccuuuugcugg

SEQ ID NO: 5575 - RNA, 21 nt, Artificial Sequence
  siRNA sense strand against b2GPI
  modified_base (1)..(1): 2'-deoxy-2'-fluoroadenosine
  modified_base (2)..(2): gm
  misc_feature (2)..(3): 5'-phosphonothioate
  modified_base (3)..(3): 2'-deoxy-2'-fluoroadenosine
  modified_base (4)..(4): gm
  modified_base (5)..(5): 2'-deoxy-2'-fluorouridine
  modified_base (6)..(6): 2'-O-methyladenosine
  modified_base (7)..(7): 2'-deoxy-2'-fluorouridine
  modified_base (8)..(8): gm
  modified_base (9)..(9): 2'-deoxy-2'-fluorouridine
  modified_base (10)..(10): cm
  modified_base (11)..(11): 2'-deoxy-2'-fluorocytidine
  modified_base (12)..(12): 2'-deoxy-2'-fluorouridine
  modified_base (13)..(13): um
  modified_base (14)..(14): 2'-deoxy-2'-fluorouridine
  modified_base (15)..(15): um
  modified_base (16)..(16): 2'-deoxy-2'-fluoroguanosine
  modified_base (17)..(17): cm
  modified_base (18)..(18): 2'-deoxy-2'-fluorouridine
  modified_base (19)..(19): gm
  modified_base (20)..(20): 2'-deoxy-2'-fluoroguanosine
  modified_base (21)..(21): 2'-O-methyladenosine
agaguauguccuuuugcugga

SEQ ID NO: 5576 - RNA, 21 nt, Artificial Sequence
  siRNA sense strand against b2GPI
  modified_base (1)..(1): 2'-deoxy-2'-fluoroguanosine
  modified_base (2)..(2): 2'-O-methyladenosine
  misc_feature (2)..(3): 5'-phosphonothioate
  modified_base (3)..(3): 2'-deoxy-2'-fluoroguanosine
  modified_base (4)..(4): um
  modified_base (5)..(5): 2'-deoxy-2'-fluoroadenosine
  modified_base (6)..(6): um
  modified_base (7)..(7): 2'-deoxy-2'-fluoroguanosine
  modified_base (8)..(8): um
  modified_base (9)..(9): 2'-deoxy-2'-fluorocytidine
  modified_base (10)..(10): cm
  modified_base (11)..(11): 2'-deoxy-2'-fluorouridine
  modified_base (12)..(12): 2'-deoxy-2'-fluorouridine
  modified_base (13)..(13): um
  modified_base (14)..(14): 2'-deoxy-2'-fluorouridine
  modified_base (15)..(15): gm
  modified_base (16)..(16): 2'-deoxy-2'-fluorocytidine
  modified_base (17)..(17): um
  modified_base (18)..(18): 2'-deoxy-2'-fluoroguanosine
  modified_base (19)..(19): gm
  modified_base (20)..(20): 2'-deoxy-2'-fluoroadenosine
  modified_base (21)..(21): 2'-O-methyladenosine
gaguauguccuuuugcuggaa

SEQ ID NO: 5577 - RNA, 21 nt, Artificial Sequence
  siRNA sense strand against b2GPI
  modified_base (1)..(1): 2'-deoxy-2'-fluoroguanosine
  modified_base (2)..(2): um
  misc_feature (2)..(3): 5'-phosphonothioate
  modified_base (3)..(3): 2'-deoxy-2'-fluoroadenosine
  modified_base (4)..(4): um
  modified_base (5)..(5): 2'-deoxy-2'-fluoroguanosine
  modified_base (6)..(6): um
  modified_base (7)..(7): 2'-deoxy-2'-fluorocytidine
  modified_base (8)..(8): cm
  modified_base (9)..(9): 2'-deoxy-2'-fluorouridine
  modified_base (10)..(10): um
  modified_base (11)..(11): 2'-deoxy-2'-fluorouridine
  modified_base (12)..(12): 2'-deoxy-2'-fluorouridine
  modified_base (13)..(13): gm
  modified_base (14)..(14): 2'-deoxy-2'-fluorocytidine
  modified_base (15)..(15): um
  modified_base (16)..(16): 2'-deoxy-2'-fluoroguanosine
  modified_base (17)..(17): gm
  modified_base (18)..(18): 2'-deoxy-2'-fluoroadenosine
  modified_base (19)..(19): 2'-O-methyladenosine
  modified_base (20)..(20): 2'-deoxy-2'-fluorouridine
  modified_base (21)..(21): cm
guauguccuuuugcuggaauc

SEQ ID NO: 5578 - RNA, 21 nt, Artificial Sequence
  siRNA sense strand against b2GPI
  modified_base (1)..(1): 2'-deoxy-2'-fluorouridine
  modified_base (2)..(2): 2'-O-methyladenosine
  misc_feature (2)..(3): 5'-phosphonothioate
  modified_base (3)..(3): 2'-deoxy-2'-fluorouridine
  modified_base (4)..(4): gm
  modified_base (5)..(5): 2'-deoxy-2'-fluorouridine
  modified_base (6)..(6): cm
  modified_base (7)..(7): 2'-deoxy-2'-fluorocytidine
  modified_base (8)..(8): um
  modified_base (9)..(9): 2'-deoxy-2'-fluorouridine
  modified_base (10)..(10): um
  modified_base (11)..(11): 2'-deoxy-2'-fluorouridine
  modified_base (12)..(12): 2'-deoxy-2'-fluoroguanosine
  modified_base (13)..(13): cm
  modified_base (14)..(14): 2'-deoxy-2'-fluorouridine
  modified_base (15)..(15): gm
  modified_base (16)..(16): 2'-deoxy-2'-fluoroguanosine
  modified_base (17)..(17): 2'-O-methyladenosine
  modified_base (18)..(18): 2'-deoxy-2'-fluoroadenosine
  modified_base (19)..(19): um
  modified_base (20)..(20): 2'-deoxy-2'-fluorocytidine
  modified_base (21)..(21): um
uauguccuuuugcuggaaucu

SEQ ID NO: 5579 - RNA, 21 nt, Artificial Sequence
  siRNA sense strand against b2GPI
  modified_base (1)..(1): 2'-deoxy-2'-fluoroadenosine
  modified_base (2)..(2): um
  misc_feature (2)..(3): 5'-phosphonothioate
  modified_base (3)..(3): 2'-deoxy-2'-fluoroguanosine
  modified_base (4)..(4): um
  modified_base (5)..(5): 2'-deoxy-2'-fluorocytidine
  modified_base (6)..(6): cm
  modified_base (7)..(7): 2'-deoxy-2'-fluorouridine
  modified_base (8)..(8): um
  modified_base (9)..(9): 2'-deoxy-2'-fluorouridine
  modified_base (10)..(10): um
  modified_base (11)..(11): 2'-deoxy-2'-fluoroguanosine
  modified_base (12)..(12): 2'-deoxy-2'-fluorocytidine
  modified_base (13)..(13): um
  modified_base (14)..(14): 2'-deoxy-2'-fluoroguanosine
  modified_base (15)..(15): gm
  modified_base (16)..(16): 2'-deoxy-2'-fluoroadenosine
  modified_base (17)..(17): 2'-O-methyladenosine
  modified_base (18)..(18): 2'-deoxy-2'-fluorouridine
  modified_base (19)..(19): cm
  modified_base (20)..(20): 2'-deoxy-2'-fluorouridine
  modified_base (21)..(21): um
auguccuuuugcuggaaucuu

SEQ ID NO: 5580 - RNA, 21 nt, Artificial Sequence
  siRNA sense strand against b2GPI
  modified_base (1)..(1): 2'-deoxy-2'-fluorouridine
  modified_base (2)..(2): gm
  misc_feature (2)..(3): 5'-phosphonothioate
  modified_base (3)..(3): 2'-deoxy-2'-fluorouridine
  modified_base (4)..(4): cm
  modified_base (5)..(5): 2'-deoxy-2'-fluorocytidine
  modified_base (6)..(6): um
  modified_base (7)..(7): 2'-deoxy-2'-fluorouridine
  modified_base (8)..(8): um
  modified_base (9)..(9): 2'-deoxy-2'-fluorouridine
  modified_base (10)..(10): gm
  modified_base (11)..(11): 2'-deoxy-2'-fluorocytidine
  modified_base (12)..(12): 2'-deoxy-2'-fluorouridine
  modified_base (13)..(13): gm
  modified_base (14)..(14): 2'-deoxy-2'-fluoroguanosine
  modified_base (15)..(15): 2'-O-methyladenosine
  modified_base (16)..(16): 2'-deoxy-2'-fluoroadenosine
  modified_base (17)..(17): um
  modified_base (18)..(18): 2'-deoxy-2'-fluorocytidine
  modified_base (19)..(19): um
  modified_base (20)..(20): 2'-deoxy-2'-fluorouridine
  modified_base (21)..(21): 2'-O-methyladenosine
uguccuuuugcuggaaucuua

SEQ ID NO: 5581 - RNA, 21 nt, Artificial Sequence
  siRNA sense strand against b2GPI
  modified_base (1)..(1): 2'-deoxy-2'-fluoroguanosine
  modified_base (2)..(2): um
  misc_feature (2)..(3): 5'-phosphonothioate
  modified_base (3)..(3): 2'-deoxy-2'-fluorocytidine
  modified_base (4)..(4): cm
  modified_base (5)..(5): 2'-deoxy-2'-fluorouridine
  modified_base (6)..(6): um
  modified_base (7)..(7): 2'-deoxy-2'-fluorouridine
  modified_base (8)..(8): um
  modified_base (9)..(9): 2'-deoxy-2'-fluoroguanosine
  modified_base (10)..(10): cm
  modified_base (11)..(11): 2'-deoxy-2'-fluorouridine
  modified_base (12)..(12): 2'-deoxy-2'-fluoroguanosine
  modified_base (13)..(13): gm
  modified_base (14)..(14): 2'-deoxy-2'-fluoroadenosine
  modified_base (15)..(15): 2'-O-methyladenosine
  modified_base (16)..(16): 2'-deoxy-2'-fluorouridine
  modified_base (17)..(17): cm
  modified_base (18)..(18): 2'-deoxy-2'-fluorouridine
  modified_base (19)..(19): um
  modified_base (20)..(20): 2'-deoxy-2'-fluoroadenosine
  modified_base (21)..(21): gm
guccuuuugcuggaaucuuag

SEQ ID NO: 5582 - RNA, 21 nt, Artificial Sequence
  siRNA sense strand against b2GPI
  modified_base (1)..(1): 2'-deoxy-2'-fluorouridine
  modified_base (2)..(2): cm
  misc_feature (2)..(3): 5'-phosphonothioate
  modified_base (3)..(3): 2'-deoxy-2'-fluorocytidine
  modified_base (4)..(4): um
  modified_base (5)..(5): 2'-deoxy-2'-fluorouridine
  modified_base (6)..(6): um
  modified_base (7)..(7): 2'-deoxy-2'-fluorouridine
  modified_base (8)..(8): gm
  modified_base (9)..(9): 2'-deoxy-2'-fluorocytidine
  modified_base (10)..(10): um
  modified_base (11)..(11): 2'-deoxy-2'-fluoroguanosine
  modified_base (12)..(12): 2'-deoxy-2'-fluoroguanosine
  modified_base (13)..(13): 2'-O-methyladenosine
  modified_base (14)..(14): 2'-deoxy-2'-fluoroadenosine
  modified_base (15)..(15): um
  modified_base (16)..(16): 2'-deoxy-2'-fluorocytidine
  modified_base (17)..(17): um
  modified_base (18)..(18): 2'-deoxy-2'-fluorouridine
  modified_base (19)..(19): 2'-O-methyladenosine
  modified_base (20)..(20): 2'-deoxy-2'-fluoroguanosine
  modified_base (21)..(21): 2'-O-methyladenosine
uccuuuugcuggaaucuuaga

SEQ ID NO: 5583 - RNA, 21 nt, Artificial Sequence
  siRNA sense strand against b2GPI
  modified_base (1)..(1): 2'-deoxy-2'-fluorouridine
  modified_base (2)..(2): um
  misc_feature (2)..(3): 5'-phosphonothioate
  modified_base (3)..(3): 2'-deoxy-2'-fluorouridine
  modified_base (4)..(4): um
  modified_base (5)..(5): 2'-deoxy-2'-fluoroguanosine
  modified_base (6)..(6): cm
  modified_base (7)..(7): 2'-deoxy-2'-fluorouridine
  modified_base (8)..(8): gm
  modified_base (9)..(9): 2'-deoxy-2'-fluoroguanosine
  modified_base (10)..(10): 2'-O-methyladenosine
  modified_base (11)..(11): 2'-deoxy-2'-fluoroadenosine
  modified_base (12)..(12): 2'-deoxy-2'-fluorouridine
  modified_base (13)..(13): cm
  modified_base (14)..(14): 2'-deoxy-2'-fluorouridine
  modified_base (15)..(15): um
  modified_base (16)..(16): 2'-deoxy-2'-fluoroadenosine
  modified_base (17)..(17): gm
  modified_base (18)..(18): 2'-deoxy-2'-fluoroadenosine
  modified_base (19)..(19): 2'-O-methyladenosine
  modified_base (20)..(20): 2'-deoxy-2'-fluoroadenosine
  modified_base (21)..(21): 2'-O-methyladenosine
uuuugcuggaaucuuagaaaa

SEQ ID NO: 5584 - RNA, 21 nt, Artificial Sequence
  siRNA sense strand against b2GPI
  modified_base (1)..(1): 2'-deoxy-2'-fluorouridine
  modified_base (2)..(2): um
  misc_feature (2)..(3): 5'-phosphonothioate
  modified_base (3)..(3): 2'-deoxy-2'-fluorouridine
  modified_base (4)..(4): gm
  modified_base (5)..(5): 2'-deoxy-2'-fluorocytidine
  modified_base (6)..(6): um
  modified_base (7)..(7): 2'-deoxy-2'-fluoroguanosine
  modified_base (8)..(8): gm
  modified_base (9)..(9): 2'-deoxy-2'-fluoroadenosine
  modified_base (10)..(10): 2'-O-methyladenosine
  modified_base (11)..(11): 2'-deoxy-2'-fluorouridine
  modified_base (12)..(12): 2'-deoxy-2'-fluorocytidine
  modified_base (13)..(13): um
  modified_base (14)..(14): 2'-deoxy-2'-fluorouridine
  modified_base (15)..(15): 2'-O-methyladenosine
  modified_base (16)..(16): 2'-deoxy-2'-fluoroguanosine
  modified_base (17)..(17): 2'-O-methyladenosine
  modified_base (18)..(18): 2'-deoxy-2'-fluoroadenosine
  modified_base (19)..(19): 2'-O-methyladenosine
  modified_base (20)..(20): 2'-deoxy-2'-fluoroadenosine
  modified_base (21)..(21): um
uuugcuggaaucuuagaaaau

SEQ ID NO: 5585 - RNA, 21 nt, Artificial Sequence
  siRNA sense strand against b2GPI
  modified_base (1)..(1): 2'-deoxy-2'-fluorouridine
  modified_base (2)..(2): um
  misc_feature (2)..(3): 5'-phosphonothioate
  modified_base (3)..(3): 2'-deoxy-2'-fluoroguanosine
  modified_base (4)..(4): cm
  modified_base (5)..(5): 2'-deoxy-2'-fluorouridine
  modified_base (6)..(6): gm
  modified_base (7)..(7): 2'-deoxy-2'-fluoroguanosine
  modified_base (8)..(8): 2'-O-methyladenosine
  modified_base (9)..(9): 2'-deoxy-2'-fluoroadenosine
  modified_base (10)..(10): um
  modified_base (11)..(11): 2'-deoxy-2'-fluorocytidine
  modified_base (12)..(12): 2'-deoxy-2'-fluorouridine
  modified_base (13)..(13): um
  modified_base (14)..(14): 2'-deoxy-2'-fluoroadenosine
  modified_base (15)..(15): gm
  modified_base (16)..(16): 2'-deoxy-2'-fluoroadenosine
  modified_base (17)..(17): 2'-O-methyladenosine
  modified_base (18)..(18): 2'-deoxy-2'-fluoroadenosine
  modified_base (19)..(19): 2'-O-methyladenosine
  modified_base (20)..(20): 2'-deoxy-2'-fluorouridine
  modified_base (21)..(21): gm
uugcuggaaucuuagaaaaug

SEQ ID NO: 5586 - RNA, 21 nt, Artificial Sequence
  siRNA sense strand against b2GPI
  modified_base (1)..(1): 2'-deoxy-2'-fluorouridine
  modified_base (2)..(2): gm
  misc_feature (2)..(3): 5'-phosphonothioate
  modified_base (3)..(3): 2'-deoxy-2'-fluorocytidine
  modified_base (4)..(4): um
  modified_base (5)..(5): 2'-deoxy-2'-fluoroguanosine
  modified_base (6)..(6): gm
  modified_base (7)..(7): 2'-deoxy-2'-fluoroadenosine
  modified_base (8)..(8): 2'-O-methyladenosine
  modified_base (9)..(9): 2'-deoxy-2'-fluorouridine
  modified_base (10)..(10): cm
  modified_base (11)..(11): 2'-deoxy-2'-fluorouridine
  modified_base (12)..(12): 2'-deoxy-2'-fluorouridine
  modified_base (13)..(13): 2'-O-methyladenosine
  modified_base (14)..(14): 2'-deoxy-2'-fluoroguanosine
  modified_base (15)..(15): 2'-O-methyladenosine
  modified_base (16)..(16): 2'-deoxy-2'-fluoroadenosine
  modified_base (17)..(17): 2'-O-methyladenosine
  modified_base (18)..(18): 2'-deoxy-2'-fluoroadenosine
  modified_base (19)..(19): um
  modified_base (20)..(20): 2'-deoxy-2'-fluoroguanosine
  modified_base (21)..(21): gm
ugcuggaaucuuagaaaaugg

SEQ ID NO: 5587 - RNA, 21 nt, Artificial Sequence
  siRNA sense strand against b2GPI
  modified_base (1)..(1): 2'-deoxy-2'-fluoroguanosine
  modified_base (2)..(2): cm
  misc_feature (2)..(3): 5'-phosphonothioate
  modified_base (3)..(3): 2'-deoxy-2'-fluorouridine
  modified_base (4)..(4): gm
  modified_base (5)..(5): 2'-deoxy-2'-fluoroguanosine
  modified_base (6)..(6): 2'-O-methyladenosine
  modified_base (7)..(7): 2'-deoxy-2'-fluoroadenosine
  modified_base (8)..(8): um
  modified_base (9)..(9): 2'-deoxy-2'-fluorocytidine
  modified_base (10)..(10): um
  modified_base (11)..(11): 2'-deoxy-2'-fluorouridine
  modified_base (12)..(12): 2'-deoxy-2'-fluoroadenosine
  modified_base (13)..(13): gm
  modified_base (14)..(14): 2'-deoxy-2'-fluoroadenosine
  modified_base (15)..(15): 2'-O-methyladenosine
  modified_base (16)..(16): 2'-deoxy-2'-fluoroadenosine
  modified_base (17)..(17): 2'-O-methyladenosine
  modified_base (18)..(18): 2'-deoxy-2'-fluorouridine
  modified_base (19)..(19): gm
  modified_base (20)..(20): 2'-deoxy-2'-fluoroguanosine
  modified_base (21)..(21): 2'-O-methyladenosine
gcuggaaucuuagaaaaugga

SEQ ID NO: 5588 - RNA, 21 nt, Artificial Sequence
  siRNA sense strand against b2GPI
  modified_base (1)..(1): 2'-deoxy-2'-fluorocytidine
  modified_base (2)..(2): um
  misc_feature (2)..(3): 5'-phosphonothioate
  modified_base (3)..(3): 2'-deoxy-2'-fluoroguanosine
  modified_base (4)..(4): gm
  modified_base (5)..(5): 2'-deoxy-2'-fluoroadenosine
  modified_base (6)..(6): 2'-O-methyladenosine
  modified_base (7)..(7): 2'-deoxy-2'-fluorouridine
  modified_base (8)..(8): cm
  modified_base (9)..(9): 2'-deoxy-2'-fluorouridine
  modified_base (10)..(10): um
  modified_base (11)..(11): 2'-deoxy-2'-fluoroadenosine
  modified_base (12)..(12): 2'-deoxy-2'-fluoroguanosine
  modified_base (13)..(13): 2'-O-methyladenosine
  modified_base (14)..(14): 2'-deoxy-2'-fluoroadenosine
  modified_base (15)..(15): 2'-O-methyladenosine
  modified_base (16)..(16): 2'-deoxy-2'-fluoroadenosine
  modified_base (17)..(17): um
  modified_base (18)..(18): 2'-deoxy-2'-fluoroguanosine
  modified_base (19)..(19): gm
  modified_base (20)..(20): 2'-deoxy-2'-fluoroadenosine
  modified_base (21)..(21): gm
cuggaaucuuagaaaauggag

SEQ ID NO: 5589 - RNA, 21 nt, Artificial Sequence
  siRNA sense strand against b2GPI
  modified_base (1)..(1): 2'-deoxy-2'-fluoroadenosine
  modified_base (2)..(2): um
  misc_feature (2)..(3): 5'-phosphonothioate
  modified_base (3)..(3): 2'-deoxy-2'-fluorocytidine
  modified_base (4)..(4): um
  modified_base (5)..(5): 2'-deoxy-2'-fluorouridine
  modified_base (6)..(6): 2'-O-methyladenosine
  modified_base (7)..(7): 2'-deoxy-2'-fluoroguanosine
  modified_base (8)..(8): 2'-O-methyladenosine
  modified_base (9)..(9): 2'-deoxy-2'-fluoroadenosine
  modified_base (10)..(10): 2'-O-methyladenosine
  modified_base (11)..(11): 2'-deoxy-2'-fluoroadenosine
  modified_base (12)..(12): 2'-deoxy-2'-fluorouridine
  modified_base (13)..(13): gm
  modified_base (14)..(14): 2'-deoxy-2'-fluoroguanosine
  modified_base (15)..(15): 2'-O-methyladenosine
  modified_base (16)..(16): 2'-deoxy-2'-fluoroguanosine
  modified_base (17)..(17): cm
  modified_base (18)..(18): 2'-deoxy-2'-fluorocytidine
  modified_base (19)..(19): gm
  modified_base (20)..(20): 2'-deoxy-2'-fluorouridine
  modified_base (21)..(21): 2'-O-methyladenosine
aucuuagaaaauggagccgua

SEQ ID NO: 5590 - RNA, 21 nt, Artificial Sequence
  siRNA sense strand against b2GPI
  modified_base (1)..(1): 2'-deoxy-2'-fluorouridine
  modified_base (2)..(2): um
  misc_feature (2)..(3): 5'-phosphonothioate
  modified_base (3)..(3): 2'-deoxy-2'-fluoroadenosine
  modified_base (4)..(4): gm
  modified_base (5)..(5): 2'-deoxy-2'-fluoroadenosine
  modified_base (6)..(6): 2'-O-methyladenosine
  modified_base (7)..(7): 2'-deoxy-2'-fluoroadenosine
  modified_base (8)..(8): 2'-O-methyladenosine
  modified_base (9)..(9): 2'-deoxy-2'-fluorouridine
  modified_base (10)..(10): gm
  modified_base (11)..(11): 2'-deoxy-2'-fluoroguanosine
  modified_base (12)..(12): 2'-deoxy-2'-fluoroadenosine
  modified_base (13)..(13): gm
  modified_base (14)..(14): 2'-deoxy-2'-fluorocytidine
  modified_base (15)..(15): cm
  modified_base (16)..(16): 2'-deoxy-2'-fluoroguanosine
  modified_base (17)..(17): um
  modified_base (18)..(18): 2'-deoxy-2'-fluoroadenosine
  modified_base (19)..(19): cm
  modified_base (20)..(20): 2'-deoxy-2'-fluoroguanosine
  modified_base (21)..(21): cm
uuagaaaauggagccguacgc

SEQ ID NO: 5591 - RNA, 21 nt, Artificial Sequence
  siRNA sense strand against b2GPI
  modified_base (1)..(1): 2'-deoxy-2'-fluorouridine
  modified_base (2)..(2): 2'-O-methyladenosine
  misc_feature (2)..(3): 5'-phosphonothioate
  modified_base (3)..(3): 2'-deoxy-2'-fluoroguanosine
  modified_base (4)..(4): 2'-O-methyladenosine
  modified_base (5)..(5): 2'-deoxy-2'-fluoroadenosine
  modified_base (6)..(6): 2'-O-methyladenosine
  modified_base (7)..(7): 2'-deoxy-2'-fluoroadenosine
  modified_base (8)..(8): um
  modified_base (9)..(9): 2'-deoxy-2'-fluoroguanosine
  modified_base (10)..(10): gm
  modified_base (11)..(11): 2'-deoxy-2'-fluoroadenosine
  modified_base (12)..(12): 2'-deoxy-2'-fluoroguanosine
  modified_base (13)..(13): cm
  modified_base (14)..(14): 2'-deoxy-2'-fluorocytidine
  modified_base (15)..(15): gm
  modified_base (16)..(16): 2'-deoxy-2'-fluorouridine
  modified_base (17)..(17): 2'-O-methyladenosine
  modified_base (18)..(18): 2'-deoxy-2'-fluorocytidine
  modified_base (19)..(19): gm
  modified_base (20)..(20): 2'-deoxy-2'-fluorocytidine
  modified_base (21)..(21): um
uagaaaauggagccguacgcu

SEQ ID NO: 5592 - RNA, 21 nt, Artificial Sequence
  siRNA sense strand against b2GPI
  modified_base (1)..(1): 2'-deoxy-2'-fluoroadenosine
  modified_base (2)..(2): gm
  misc_feature (2)..(3): 5'-phosphonothioate
  modified_base (3)..(3): 2'-deoxy-2'-fluoroadenosine
  modified_base (4)..(4): 2'-O-methyladenosine
  modified_base (5)..(5): 2'-deoxy-2'-fluoroadenosine
  modified_base (6)..(6): 2'-O-methyladenosine
  modified_base (7)..(7): 2'-deoxy-2'-fluorouridine
  modified_base (8)..(8): gm
  modified_base (9)..(9): 2'-deoxy-2'-fluoroguanosine
  modified_base (10)..(10): 2'-O-methyladenosine
  modified_base (11)..(11): 2'-deoxy-2'-fluoroguanosine
  modified_base (12)..(12): 2'-deoxy-2'-fluorocytidine
  modified_base (13)..(13): cm
  modified_base (14)..(14): 2'-deoxy-2'-fluoroguanosine
  modified_base (15)..(15): um
  modified_base (16)..(16): 2'-deoxy-2'-fluoroadenosine
  modified_base (17)..(17): cm
  modified_base (18)..(18): 2'-deoxy-2'-fluoroguanosine
  modified_base (19)..(19): cm
  modified_base (20)..(20): 2'-deoxy-2'-fluorouridine
  modified_base (21)..(21): 2'-O-methyladenosine
agaaaauggagccguacgcua

SEQ ID NO: 5593 - RNA, 21 nt, Artificial Sequence
  siRNA sense strand against b2GPI
  modified_base (1)..(1): 2'-deoxy-2'-fluoroguanosine
  modified_base (2)..(2): 2'-O-methyladenosine
  misc_feature (2)..(3): 5'-phosphonothioate
  modified_base (3)..(3): 2'-deoxy-2'-fluoroadenosine
  modified_base (4)..(4): 2'-O-methyladenosine
  modified_base (5)..(5): 2'-deoxy-2'-fluoroadenosine
  modified_base (6)..(6): um
  modified_base (7)..(7): 2'-deoxy-2'-fluoroguanosine
  modified_base (8)..(8): gm
  modified_base (9)..(9): 2'-deoxy-2'-fluoroadenosine
  modified_base (10)..(10): gm
  modified_base (11)..(11): 2'-deoxy-2'-fluorocytidine
  modified_base (12)..(12): 2'-deoxy-2'-fluorocytidine
  modified_base (13)..(13): gm
  modified_base (14)..(14): 2'-deoxy-2'-fluorouridine
  modified_base (15)..(15): 2'-O-methyladenosine
  modified_base (16)..(16): 2'-deoxy-2'-fluorocytidine
  modified_base (17)..(17): gm
  modified_base (18)..(18): 2'-deoxy-2'-fluorocytidine
  modified_base (19)..(19): um
  modified_base (20)..(20): 2'-deoxy-2'-fluoroadenosine
  modified_base (21)..(21): um
gaaaauggagccguacgcuau

SEQ ID NO: 5594 - RNA, 21 nt, Artificial Sequence
  siRNA sense strand against b2GPI
  modified_base (1)..(1): 2'-deoxy-2'-fluoroadenosine
  modified_base (2)..(2): 2'-O-methyladenosine
  misc_feature (2)..(3): 5'-phosphonothioate
  modified_base (3)..(3): 2'-deoxy-2'-fluoroadenosine
  modified_base (4)..(4): 2'-O-methyladenosine
  modified_base (5)..(5): 2'-deoxy-2'-fluorouridine
  modified_base (6)..(6): gm
  modified_base (7)..(7): 2'-deoxy-2'-fluoroguanosine
  modified_base (8)..(8): 2'-O-methyladenosine
  modified_base (9)..(9): 2'-deoxy-2'-fluoroguanosine
  modified_base (10)..(10): cm
  modified_base (11)..(11): 2'-deoxy-2'-fluorocytidine
  modified_base (12)..(12): 2'-deoxy-2'-fluoroguanosine
  modified_base (13)..(13): um
  modified_base (14)..(14): 2'-deoxy-2'-fluoroadenosine
  modified_base (15)..(15): cm
  modified_base (16)..(16): 2'-deoxy-2'-fluoroguanosine
  modified_base (17)..(17): cm
  modified_base (18)..(18): 2'-deoxy-2'-fluorouridine
  modified_base (19)..(19): 2'-O-methyladenosine
  modified_base (20)..(20): 2'-deoxy-2'-fluorouridine
  modified_base (21)..(21): 2'-O-methyladenosine
aaaauggagccguacgcuaua

SEQ ID NO: 5595 - RNA, 21 nt, Artificial Sequence
  siRNA sense strand against b2GPI
  modified_base (1)..(1): 2'-deoxy-2'-fluoroadenosine
  modified_base (2)..(2): um
  misc_feature (2)..(3): 5'-phosphonothioate
  modified_base (3)..(3): 2'-deoxy-2'-fluoroguanosine
  modified_base (4)..(4): gm
  modified_base (5)..(5): 2'-deoxy-2'-fluoroadenosine
  modified_base (6)..(6): gm
  modified_base (7)..(7): 2'-deoxy-2'-fluorocytidine
  modified_base (8)..(8): cm
  modified_base (9)..(9): 2'-deoxy-2'-fluoroguanosine
  modified_base (10)..(10): um
  modified_base (11)..(11): 2'-deoxy-2'-fluoroadenosine
  modified_base (12)..(12): 2'-deoxy-2'-fluorocytidine
  modified_base (13)..(13): gm
  modified_base (14)..(14): 2'-deoxy-2'-fluorocytidine
  modified_base (15)..(15): um
  modified_base (16)..(16): 2'-deoxy-2'-fluoroadenosine
  modified_base (17)..(17): um
  modified_base (18)..(18): 2'-deoxy-2'-fluoroadenosine
  modified_base (19)..(19): cm
  modified_base (20)..(20): 2'-deoxy-2'-fluoroguanosine
  modified_base (21)..(21): 2'-O-methyladenosine
auggagccguacgcuauacga

SEQ ID NO: 5596 - RNA, 21 nt, Artificial Sequence
  siRNA sense strand against b2GPI
  modified_base (1)..(1): 2'-deoxy-2'-fluorouridine
  modified_base (2)..(2): gm
  misc_feature (2)..(3): 5'-phosphonothioate
  modified_base (3)..(3): 2'-deoxy-2'-fluoroguanosine
  modified_base (4)..(4): 2'-O-methyladenosine
  modified_base (5)..(5): 2'-deoxy-2'-fluoroguanosine
  modified_base (6)..(6): cm
  modified_base (7)..(7): 2'-deoxy-2'-fluorocytidine
  modified_base (8)..(8): gm
  modified_base (9)..(9): 2'-deoxy-2'-fluorouridine
  modified_base (10)..(10): 2'-O-methyladenosine
  modified_base (11)..(11): 2'-deoxy-2'-fluorocytidine
  modified_base (12)..(12): 2'-deoxy-2'-fluoroguanosine
  modified_base (13)..(13): cm
  modified_base (14)..(14): 2'-deoxy-2'-fluorouridine
  modified_base (15)..(15): 2'-O-methyladenosine
  modified_base (16)..(16): 2'-deoxy-2'-fluorouridine
  modified_base (17)..(17): 2'-O-methyladenosine
  modified_base (18)..(18): 2'-deoxy-2'-fluorocytidine
  modified_base (19)..(19): gm
  modified_base (20)..(20): 2'-deoxy-2'-fluoroadenosine
  modified_base (21)..(21): cm
uggagccguacgcuauacgac

SEQ ID NO: 5597 - RNA, 21 nt, Artificial Sequence
  siRNA sense strand against b2GPI
  modified_base (1)..(1): 2'-deoxy-2'-fluoroguanosine
  modified_base (2)..(2): gm
  misc_feature (2)..(3): 5'-phosphonothioate
  modified_base (3)..(3): 2'-deoxy-2'-fluoroadenosine
  modified_base (4)..(4): gm
  modified_base (5)..(5): 2'-deoxy-2'-fluorocytidine
  modified_base (6)..(6): cm
  modified_base (7)..(7): 2'-deoxy-2'-fluoroguanosine
  modified_base (8)..(8): um
  modified_base (9)..(9): 2'-deoxy-2'-fluoroadenosine
  modified_base (10)..(10): cm
  modified_base (11)..(11): 2'-deoxy-2'-fluoroguanosine
  modified_base (12)..(12): 2'-deoxy-2'-fluorocytidine
  modified_base (13)..(13): um
  modified_base (14)..(14): 2'-deoxy-2'-fluoroadenosine
  modified_base (15)..(15): um
  modified_base (16)..(16): 2'-deoxy-2'-fluoroadenosine
  modified_base (17)..(17): cm
  modified_base (18)..(18): 2'-deoxy-2'-fluoroguanosine
  modified_base (19)..(19): 2'-O-methyladenosine
  modified_base (20)..(20): 2'-deoxy-2'-fluorocytidine
  modified_base (21)..(21): um
ggagccguacgcuauacgacu

SEQ ID NO: 5598 - RNA, 21 nt, Artificial Sequence
  siRNA sense strand against b2GPI
  modified_base (1)..(1): 2'-deoxy-2'-fluoroguanosine
  modified_base (2)..(2): 2'-O-methyladenosine
  misc_feature (2)..(3): 5'-phosphonothioate
  modified_base (3)..(3): 2'-deoxy-2'-fluoroguanosine
  modified_base (4)..(4): cm
  modified_base (5)..(5): 2'-deoxy-2'-fluorocytidine
  modified_base (6)..(6): gm
  modified_base (7)..(7): 2'-deoxy-2'-fluorouridine
  modified_base (8)..(8): 2'-O-methyladenosine
  modified_base (9)..(9): 2'-deoxy-2'-fluorocytidine
  modified_base (10)..(10): gm
  modified_base (11)..(11): 2'-deoxy-2'-fluorocytidine
  modified_base (12)..(12): 2'-deoxy-2'-fluorouridine
  modified_base (13)..(13): 2'-O-methyladenosine
  modified_base (14)..(14): 2'-deoxy-2'-fluorouridine
  modified_base (15)..(15): 2'-O-methyladenosine
  modified_base (16)..(16): 2'-deoxy-2'-fluorocytidine
  modified_base (17)..(17): gm
  modified_base (18)..(18): 2'-deoxy-2'-fluoroadenosine
  modified_base (19)..(19): cm
  modified_base (20)..(20): 2'-deoxy-2'-fluorouridine
  modified_base (21)..(21): um
gagccguacgcuauacgacuu

SEQ ID NO: 5599 - RNA, 21 nt, Artificial Sequence
  siRNA sense strand against b2GPI
  modified_base (1)..(1): 2'-deoxy-2'-fluoroadenosine
  modified_base (2)..(2): gm
  misc_feature (2)..(3): 5'-phosphonothioate
  modified_base (3)..(3): 2'-deoxy-2'-fluorocytidine
  modified_base (4)..(4): cm
  modified_base (5)..(5): 2'-deoxy-2'-fluoroguanosine
  modified_base (6)..(6): um
  modified_base (7)..(7): 2'-deoxy-2'-fluoroadenosine
  modified_base (8)..(8): cm
  modified_base (9)..(9): 2'-deoxy-2'-fluoroguanosine
  modified_base (10)..(10): cm
  modified_base (11)..(11): 2'-deoxy-2'-fluorouridine
  modified_base (12)..(12): 2'-deoxy-2'-fluoroadenosine
  modified_base (13)..(13): um
  modified_base (14)..(14): 2'-deoxy-2'-fluoroadenosine
  modified_base (15)..(15): cm
  modified_base (16)..(16): 2'-deoxy-2'-fluoroguanosine
  modified_base (17)..(17): 2'-O-methyladenosine
  modified_base (18)..(18): 2'-deoxy-2'-fluorocytidine
  modified_base (19)..(19): um
  modified_base (20)..(20): 2'-deoxy-2'-fluorouridine
  modified_base (21)..(21): um
agccguacgcuauacgacuuu

SEQ ID NO: 5600 - RNA, 21 nt, Artificial Sequence
  siRNA sense strand against b2GPI
  modified_base (1)..(1): 2'-deoxy-2'-fluoroguanosine
  modified_base (2)..(2): cm
  misc_feature (2)..(3): 5'-phosphonothioate
  modified_base (3)..(3): 2'-deoxy-2'-fluorocytidine
  modified_base (4)..(4): gm
  modified_base (5)..(5): 2'-deoxy-2'-fluorouridine
  modified_base (6)..(6): 2'-O-methyladenosine
  modified_base (7)..(7): 2'-deoxy-2'-fluorocytidine
  modified_base (8)..(8): gm
  modified_base (9)..(9): 2'-deoxy-2'-fluorocytidine
  modified_base (10)..(10): um
  modified_base (11)..(11): 2'-deoxy-2'-fluoroadenosine
  modified_base (12)..(12): 2'-deoxy-2'-fluorouridine
  modified_base (13)..(13): 2'-O-methyladenosine
  modified_base (14)..(14): 2'-deoxy-2'-fluorocytidine
  modified_base (15)..(15): gm
  modified_base (16)..(16): 2'-deoxy-2'-fluoroadenosine
  modified_base (17)..(17): cm
  modified_base (18)..(18): 2'-deoxy-2'-fluorouridine
  modified_base (19)..(19): um
  modified_base (20)..(20): 2'-deoxy-2'-fluorouridine
  modified_base (21)..(21): um
gccguacgcuauacgacuuuu

SEQ ID NO: 5601 - RNA, 21 nt, Artificial Sequence
  siRNA sense strand against b2GPI
  modified_base (1)..(1): 2'-deoxy-2'-fluorocytidine
  modified_base (2)..(2): cm
  misc_feature (2)..(3): 5'-phosphonothioate
  modified_base (3)..(3): 2'-deoxy-2'-fluoroguanosine
  modified_base (4)..(4): um
  modified_base (5)..(5): 2'-deoxy-2'-fluoroadenosine
  modified_base (6)..(6): cm
  modified_base (7)..(7): 2'-deoxy-2'-fluoroguanosine
  modified_base (8)..(8): cm
  modified_base (9)..(9): 2'-deoxy-2'-fluorouridine
  modified_base (10)..(10): 2'-O-methyladenosine
  modified_base (11)..(11): 2'-deoxy-2'-fluorouridine
  modified_base (12)..(12): 2'-deoxy-2'-fluoroadenosine
  modified_base (13)..(13): cm
  modified_base (14)..(14): 2'-deoxy-2'-fluoroguanosine
  modified_base (15)..(15): 2'-O-methyladenosine
  modified_base (16)..(16): 2'-deoxy-2'-fluorocytidine
  modified_base (17)..(17): um
  modified_base (18)..(18): 2'-deoxy-2'-fluorouridine
  modified_base (19)..(19): um
  modified_base (20)..(20): 2'-deoxy-2'-fluorouridine
  modified_base (21)..(21): gm
ccguacgcuauacgacuuuug

SEQ ID NO: 5602 - RNA, 21 nt, Artificial Sequence
  siRNA sense strand against b2GPI
  modified_base (1)..(1): 2'-deoxy-2'-fluorocytidine
  modified_base (2)..(2): gm
  misc_feature (2)..(3): 5'-phosphonothioate
  modified_base (3)..(3): 2'-deoxy-2'-fluorouridine
  modified_base (4)..(4): 2'-O-methyladenosine
  modified_base (5)..(5): 2'-deoxy-2'-fluorocytidine
  modified_base (6)..(6): gm
  modified_base (7)..(7): 2'-deoxy-2'-fluorocytidine
  modified_base (8)..(8): um
  modified_base (9)..(9): 2'-deoxy-2'-fluoroadenosine
  modified_base (10)..(10): um
  modified_base (11)..(11): 2'-deoxy-2'-fluoroadenosine
  modified_base (12)..(12): 2'-deoxy-2'-fluorocytidine
  modified_base (13)..(13): gm
  modified_base (14)..(14): 2'-deoxy-2'-fluoroadenosine
  modified_base (15)..(15): cm
  modified_base (16)..(16): 2'-deoxy-2'-fluorouridine
  modified_base (17)..(17): um
  modified_base (18)..(18): 2'-deoxy-2'-fluorouridine
  modified_base (19)..(19): um
  modified_base (20)..(20): 2'-deoxy-2'-fluoroguanosine
  modified_base (21)..(21): 2'-O-methyladenosine
cguacgcuauacgacuuuuga

SEQ ID NO: 5603 - RNA, 21 nt, Artificial Sequence
  siRNA sense strand against b2GPI
  modified_base (1)..(1): 2'-deoxy-2'-fluoroguanosine
  modified_base (2)..(2): um
  misc_feature (2)..(3): 5'-phosphonothioate
  modified_base (3)..(3): 2'-deoxy-2'-fluoroadenosine
  modified_base (4)..(4): cm
  modified_base (5)..(5): 2'-deoxy-2'-fluoroguanosine
  modified_base (6)..(6): cm
  modified_base (7)..(7): 2'-deoxy-2'-fluorouridine
  modified_base (8)..(8): 2'-O-methyladenosine
  modified_base (9)..(9): 2'-deoxy-2'-fluorouridine
  modified_base (10)..(10): 2'-O-methyladenosine
  modified_base (11)..(11): 2'-deoxy-2'-fluorocytidine
  modified_base (12)..(12): 2'-deoxy-2'-fluoroguanosine
  modified_base (13)..(13): 2'-O-methyladenosine
  modified_base (14)..(14): 2'-deoxy-2'-fluorocytidine
  modified_base (15)..(15): um
  modified_base (16)..(16): 2'-deoxy-2'-fluorouridine
  modified_base (17)..(17): um
  modified_base (18)..(18): 2'-deoxy-2'-fluorouridine
  modified_base (19)..(19): gm
  modified_base (20)..(20): 2'-deoxy-2'-fluoroadenosine
  modified_base (21)..(21): 2'-O-methyladenosine
guacgcuauacgacuuuugaa

SEQ ID NO: 5604 - RNA, 21 nt, Artificial Sequence
  siRNA sense strand against b2GPI
  modified_base (1)..(1): 2'-deoxy-2'-fluorouridine
  modified_base (2)..(2): 2'-O-methyladenosine
  misc_feature (2)..(3): 5'-phosphonothioate
  modified_base (3)..(3): 2'-deoxy-2'-fluorocytidine
  modified_base (4)..(4): gm
  modified_base (5)..(5): 2'-deoxy-2'-fluorocytidine
  modified_base (6)..(6): um
  modified_base (7)..(7): 2'-deoxy-2'-fluoroadenosine
  modified_base (8)..(8): um
  modified_base (9)..(9): 2'-deoxy-2'-fluoroadenosine
  modified_base (10)..(10): cm
  modified_base (11)..(11): 2'-deoxy-2'-fluoroguanosine
  modified_base (12)..(12): 2'-deoxy-2'-fluoroadenosine
  modified_base (13)..(13): cm
  modified_base (14)..(14): 2'-deoxy-2'-fluorouridine
  modified_base (15)..(15): um
  modified_base (16)..(16): 2'-deoxy-2'-fluorouridine
  modified_base (17)..(17): um
  modified_base (18)..(18): 2'-deoxy-2'-fluoroguanosine
  modified_base (19)..(19): 2'-O-methyladenosine
  modified_base (20)..(20): 2'-deoxy-2'-fluoroadenosine
  modified_base (21)..(21): um
uacgcuauacgacuuuugaau

SEQ ID NO: 5605 - RNA, 21 nt, Artificial Sequence
  siRNA sense strand against b2GPI
  modified_base (1)..(1): 2'-deoxy-2'-fluorocytidine
  modified_base (2)..(2): gm
  misc_feature (2)..(3): 5'-phosphonothioate
  modified_base (3)..(3): 2'-deoxy-2'-fluorocytidine
  modified_base (4)..(4): um
  modified_base (5)..(5): 2'-deoxy-2'-fluoroadenosine
  modified_base (6)..(6): um
  modified_base (7)..(7): 2'-deoxy-2'-fluoroadenosine
  modified_base (8)..(8): cm
  modified_base (9)..(9): 2'-deoxy-2'-fluoroguanosine
  modified_base (10)..(10): 2'-O-methyladenosine
  modified_base (11)..(11): 2'-deoxy-2'-fluorocytidine
  modified_base (12)..(12): 2'-deoxy-2'-fluorouridine
  modified_base (13)..(13): um
  modified_base (14)..(14): 2'-deoxy-2'-fluorouridine
  modified_base (15)..(15): um
  modified_base (16)..(16): 2'-deoxy-2'-fluoroguanosine
  modified_base (17)..(17): 2'-O-methyladenosine
  modified_base (18)..(18): 2'-deoxy-2'-fluoroadenosine
  modified_base (19)..(19): um
  modified_base (20)..(20): 2'-deoxy-2'-fluoroadenosine
  modified_base (21)..(21): um
cgcuauacgacuuuugaauau

SEQ ID NO: 5606 - RNA, 21 nt, Artificial Sequence
  siRNA sense strand against b2GPI
  modified_base (1)..(1): 2'-deoxy-2'-fluoroguanosine
  modified_base (2)..(2): cm
  misc_feature (2)..(3): 5'-phosphonothioate
  modified_base (3)..(3): 2'-deoxy-2'-fluorouridine
  modified_base (4)..(4): 2'-O-methyladenosine
  modified_base (5)..(5): 2'-deoxy-2'-fluorouridine
  modified_base (6)..(6): 2'-O-methyladenosine
  modified_base (7)..(7): 2'-deoxy-2'-fluorocytidine
  modified_base (8)..(8): gm
  modified_base (9)..(9): 2'-deoxy-2'-fluoroadenosine
  modified_base (10)..(10): cm
  modified_base (11)..(11): 2'-deoxy-2'-fluorouridine
  modified_base (12)..(12): 2'-deoxy-2'-fluorouridine
  modified_base (13)..(13): um
  modified_base (14)..(14): 2'-deoxy-2'-fluorouridine
  modified_base (15)..(15): gm
  modified_base (16)..(16): 2'-deoxy-2'-fluoroadenosine
  modified_base (17)..(17): 2'-O-methyladenosine
  modified_base (18)..(18): 2'-deoxy-2'-fluorouridine
  modified_base (19)..(19): 2'-O-methyladenosine
  modified_base (20)..(20): 2'-deoxy-2'-fluorouridine
  modified_base (21)..(21): cm
gcuauacgacuuuugaauauc

SEQ ID NO: 5607 - RNA, 21 nt, Artificial Sequence
  siRNA sense strand against b2GPI
  modified_base (1)..(1): 2'-deoxy-2'-fluoroadenosine
  modified_base (2)..(2): um
  misc_feature (2)..(3): 5'-phosphonothioate
  modified_base (3)..(3): 2'-deoxy-2'-fluoroadenosine
  modified_base (4)..(4): cm
  modified_base (5)..(5): 2'-deoxy-2'-fluoroguanosine
  modified_base (6)..(6): 2'-O-methyladenosine
  modified_base (7)..(7): 2'-deoxy-2'-fluorocytidine
  modified_base (8)..(8): um
  modified_base (9)..(9): 2'-deoxy-2'-fluorouridine
  modified_base (10)..(10): um
  modified_base (11)..(11): 2'-deoxy-2'-fluorouridine
  modified_base (12)..(12): 2'-deoxy-2'-fluoroguanosine
  modified_base (13)..(13): 2'-O-methyladenosine
  modified_base (14)..(14): 2'-deoxy-2'-fluoroadenosine
  modified_base (15)..(15): um
  modified_base (16)..(16): 2'-deoxy-2'-fluoroadenosine
  modified_base (17)..(17): um
  modified_base (18)..(18): 2'-deoxy-2'-fluorocytidine
  modified_base (19)..(19): cm
  modified_base (20)..(20): 2'-deoxy-2'-fluorocytidine
  modified_base (21)..(21): 2'-O-methyladenosine
auacgacuuuugaauauccca

SEQ ID NO: 5608 - RNA, 21 nt, Artificial Sequence
  siRNA sense strand against b2GPI
  modified_base (1)..(1): 2'-deoxy-2'-fluorouridine
  modified_base (2)..(2): 2'-O-methyladenosine
  misc_feature (2)..(3): 5'-phosphonothioate
  modified_base (3)..(3): 2'-deoxy-2'-fluorocytidine
  modified_base (4)..(4): gm
  modified_base (5)..(5): 2'-deoxy-2'-fluoroadenosine
  modified_base (6)..(6): cm
  modified_base (7)..(7): 2'-deoxy-2'-fluorouridine
  modified_base (8)..(8): um
  modified_base (9)..(9): 2'-deoxy-2'-fluorouridine
  modified_base (10)..(10): um
  modified_base (11)..(11): 2'-deoxy-2'-fluoroguanosine
  modified_base (12)..(12): 2'-deoxy-2'-fluoroadenosine
  modified_base (13)..(13): 2'-O-methyladenosine
  modified_base (14)..(14): 2'-deoxy-2'-fluorouridine
  modified_base (15)..(15): 2'-O-methyladenosine
  modified_base (16)..(16): 2'-deoxy-2'-fluorouridine
  modified_base (17)..(17): cm
  modified_base (18)..(18): 2'-deoxy-2'-fluorocytidine
  modified_base (19)..(19): cm
  modified_base (20)..(20): 2'-deoxy-2'-fluoroadenosine
  modified_base (21)..(21): 2'-O-methyladenosine
uacgacuuuugaauaucccaa

SEQ ID NO: 5609 - RNA, 21 nt, Artificial Sequence
  siRNA sense strand against b2GPI
  modified_base (1)..(1): 2'-deoxy-2'-fluoroadenosine
  modified_base (2)..(2): cm
  misc_feature (2)..(3): 5'-phosphonothioate
  modified_base (3)..(3): 2'-deoxy-2'-fluoroguanosine
  modified_base (4)..(4): 2'-O-methyladenosine
  modified_base (5)..(5): 2'-deoxy-2'-fluorocytidine
  modified_base (6)..(6): um
  modified_base (7)..(7): 2'-deoxy-2'-fluorouridine
  modified_base (8)..(8): um
  modified_base (9)..(9): 2'-deoxy-2'-fluorouridine
  modified_base (10)..(10): gm
  modified_base (11)..(11): 2'-deoxy-2'-fluoroadenosine
  modified_base (12)..(12): 2'-deoxy-2'-fluoroadenosine
  modified_base (13)..(13): um
  modified_base (14)..(14): 2'-deoxy-2'-fluoroadenosine
  modified_base (15)..(15): um
  modified_base (16)..(16): 2'-deoxy-2'-fluorocytidine
  modified_base (17)..(17): cm
  modified_base (18)..(18): 2'-deoxy-2'-fluorocytidine
  modified_base (19)..(19): 2'-O-methyladenosine
  modified_base (20)..(20): 2'-deoxy-2'-fluoroadenosine
  modified_base (21)..(21): cm
acgacuuuugaauaucccaac

SEQ ID NO: 5610 - RNA, 21 nt, Artificial Sequence
  siRNA sense strand against b2GPI
  modified_base (1)..(1): 2'-deoxy-2'-fluorocytidine
  modified_base (2)..(2): gm
  misc_feature (2)..(3): 5'-phosphonothioate
  modified_base (3)..(3): 2'-deoxy-2'-fluoroadenosine
  modified_base (4)..(4): cm
  modified_base (5)..(5): 2'-deoxy-2'-fluorouridine
  modified_base (6)..(6): um
  modified_base (7)..(7): 2'-deoxy-2'-fluorouridine
  modified_base (8)..(8): um
  modified_base (9)..(9): 2'-deoxy-2'-fluoroguanosine
  modified_base (10)..(10): 2'-O-methyladenosine
  modified_base (11)..(11): 2'-deoxy-2'-fluoroadenosine
  modified_base (12)..(12): 2'-deoxy-2'-fluorouridine
  modified_base (13)..(13): 2'-O-methyladenosine
  modified_base (14)..(14): 2'-deoxy-2'-fluorouridine
  modified_base (15)..(15): cm
  modified_base (16)..(16): 2'-deoxy-2'-fluorocytidine
  modified_base (17)..(17): cm
  modified_base (18)..(18): 2'-deoxy-2'-fluoroadenosine
  modified_base (19)..(19): 2'-O-methyladenosine
  modified_base (20)..(20): 2'-deoxy-2'-fluorocytidine
  modified_base (21)..(21): 2'-O-methyladenosine
cgacuuuugaauaucccaaca

SEQ ID NO: 5611 - RNA, 21 nt, Artificial Sequence
  siRNA sense strand against b2GPI
  modified_base (1)..(1): 2'-deoxy-2'-fluorocytidine
  modified_base (2)..(2): um
  misc_feature (2)..(3): 5'-phosphonothioate
  modified_base (3)..(3): 2'-deoxy-2'-fluorouridine
  modified_base (4)..(4): um
  modified_base (5)..(5): 2'-deoxy-2'-fluorouridine
  modified_base (6)..(6): gm
  modified_base (7)..(7): 2'-deoxy-2'-fluoroadenosine
  modified_base (8)..(8): 2'-O-methyladenosine
  modified_base (9)..(9): 2'-deoxy-2'-fluorouridine
  modified_base (10)..(10): 2'-O-methyladenosine
  modified_base (11)..(11): 2'-deoxy-2'-fluorouridine
  modified_base (12)..(12): 2'-deoxy-2'-fluorocytidine
  modified_base (13)..(13): cm
  modified_base (14)..(14): 2'-deoxy-2'-fluorocytidine
  modified_base (15)..(15): 2'-O-methyladenosine
  modified_base (16)..(16): 2'-deoxy-2'-fluoroadenosine
  modified_base (17)..(17): cm
  modified_base (18)..(18): 2'-deoxy-2'-fluoroadenosine
  modified_base (19)..(19): cm
  modified_base (20)..(20): 2'-deoxy-2'-fluoroguanosine
  modified_base (21)..(21): 2'-O-methyladenosine
cuuuugaauaucccaacacga

SEQ ID NO: 5612 - RNA, 21 nt, Artificial Sequence
  siRNA sense strand against b2GPI
  modified_base (1)..(1): 2'-deoxy-2'-fluorouridine
  modified_base (2)..(2): um
  misc_feature (2)..(3): 5'-phosphonothioate
  modified_base (3)..(3): 2'-deoxy-2'-fluorouridine
  modified_base (4)..(4): um
  modified_base (5)..(5): 2'-deoxy-2'-fluoroguanosine
  modified_base (6)..(6): 2'-O-methyladenosine
  modified_base (7)..(7): 2'-deoxy-2'-fluoroadenosine
  modified_base (8)..(8): um
  modified_base (9)..(9): 2'-deoxy-2'-fluoroadenosine
  modified_base (10)..(10): um
  modified_base (11)..(11): 2'-deoxy-2'-fluorocytidine
  modified_base (12)..(12): 2'-deoxy-2'-fluorocytidine
  modified_base (13)..(13): cm
  modified_base (14)..(14): 2'-deoxy-2'-fluoroadenosine
  modified_base (15)..(15): 2'-O-methyladenosine
  modified_base (16)..(16): 2'-deoxy-2'-fluorocytidine
  modified_base (17)..(17): 2'-O-methyladenosine
  modified_base (18)..(18): 2'-deoxy-2'-fluorocytidine
  modified_base (19)..(19): gm
  modified_base (20)..(20): 2'-deoxy-2'-fluoroadenosine
  modified_base (21)..(21): um
uuuugaauaucccaacacgau

SEQ ID NO: 5613 - RNA, 21 nt, Artificial Sequence
  siRNA sense strand against b2GPI
  modified_base (1)..(1): 2'-deoxy-2'-fluorouridine
  modified_base (2)..(2): um
  misc_feature (2)..(3): 5'-phosphonothioate
  modified_base (3)..(3): 2'-deoxy-2'-fluorouridine
  modified_base (4)..(4): gm
  modified_base (5)..(5): 2'-deoxy-2'-fluoroadenosine
  modified_base (6)..(6): 2'-O-methyladenosine
  modified_base (7)..(7): 2'-deoxy-2'-fluorouridine
  modified_base (8)..(8): 2'-O-methyladenosine
  modified_base (9)..(9): 2'-deoxy-2'-fluorouridine
  modified_base (10)..(10): cm
  modified_base (11)..(11): 2'-deoxy-2'-fluorocytidine
  modified_base (12)..(12): 2'-deoxy-2'-fluorocytidine
  modified_base (13)..(13): 2'-O-methyladenosine
  modified_base (14)..(14): 2'-deoxy-2'-fluoroadenosine
  modified_base (15)..(15): cm
  modified_base (16)..(16): 2'-deoxy-2'-fluoroadenosine
  modified_base (17)..(17): cm
  modified_base (18)..(18): 2'-deoxy-2'-fluoroguanosine
  modified_base (19)..(19): 2'-O-methyladenosine
  modified_base (20)..(20): 2'-deoxy-2'-fluorouridine
  modified_base (21)..(21): cm
uuugaauaucccaacacgauc

SEQ ID NO: 5614 - RNA, 21 nt, Artificial Sequence
  siRNA sense strand against b2GPI
  modified_base (1)..(1): 2'-deoxy-2'-fluorouridine
  modified_base (2)..(2): um
  misc_feature (2)..(3): 5'-phosphonothioate
  modified_base (3)..(3): 2'-deoxy-2'-fluoroguanosine
  modified_base (4)..(4): 2'-O-methyladenosine
  modified_base (5)..(5): 2'-deoxy-2'-fluoroadenosine
  modified_base (6)..(6): um
  modified_base (7)..(7): 2'-deoxy-2'-fluoroadenosine
  modified_base (8)..(8): um
  modified_base (9)..(9): 2'-deoxy-2'-fluorocytidine
  modified_base (10)..(10): cm
  modified_base (11)..(11): 2'-deoxy-2'-fluorocytidine
  modified_base (12)..(12): 2'-deoxy-2'-fluoroadenosine
  modified_base (13)..(13): 2'-O-methyladenosine
  modified_base (14)..(14): 2'-deoxy-2'-fluorocytidine
  modified_base (15)..(15): 2'-O-methyladenosine
  modified_base (16)..(16): 2'-deoxy-2'-fluorocytidine
  modified_base (17)..(17): gm
  modified_base (18)..(18): 2'-deoxy-2'-fluoroadenosine
  modified_base (19)..(19): um
  modified_base (20)..(20): 2'-deoxy-2'-fluorocytidine
  modified_base (21)..(21): 2'-O-methyladenosine
uugaauaucccaacacgauca

SEQ ID NO: 5615 - RNA, 21 nt, Artificial Sequence
  siRNA sense strand against b2GPI
  modified_base (1)..(1): 2'-deoxy-2'-fluoroadenosine
  modified_base (2)..(2): 2'-O-methyladenosine
  misc_feature (2)..(3): 5'-phosphonothioate
  modified_base (3)..(3): 2'-deoxy-2'-fluorouridine
  modified_base (4)..(4): 2'-O-methyladenosine
  modified_base (5)..(5): 2'-deoxy-2'-fluorouridine
  modified_base (6)..(6): cm
  modified_base (7)..(7): 2'-deoxy-2'-fluorocytidine
  modified_base (8)..(8): cm
  modified_base (9)..(9): 2'-deoxy-2'-fluoroadenosine
  modified_base (10)..(10): 2'-O-methyladenosine
  modified_base (11)..(11): 2'-deoxy-2'-fluorocytidine
  modified_base (12)..(12): 2'-deoxy-2'-fluoroadenosine
  modified_base (13)..(13): cm
  modified_base (14)..(14): 2'-deoxy-2'-fluoroguanosine
  modified_base (15)..(15): 2'-O-methyladenosine
  modified_base (16)..(16): 2'-deoxy-2'-fluorouridine
  modified_base (17)..(17): cm
  modified_base (18)..(18): 2'-deoxy-2'-fluoroadenosine
  modified_base (19)..(19): gm
  modified_base (20)..(20): 2'-deoxy-2'-fluorouridine
  modified_base (21)..(21): um
aauaucccaacacgaucaguu

SEQ ID NO: 5616 - RNA, 21 nt, Artificial Sequence
  siRNA sense strand against b2GPI
  modified_base (1)..(1): 2'-deoxy-2'-fluoroadenosine
  modified_base (2)..(2): um
  misc_feature (2)..(3): 5'-phosphonothioate
  modified_base (3)..(3): 2'-deoxy-2'-fluoroadenosine
  modified_base (4)..(4): um
  modified_base (5)..(5): 2'-deoxy-2'-fluorocytidine
  modified_base (6)..(6): cm
  modified_base (7)..(7): 2'-deoxy-2'-fluorocytidine
  modified_base (8)..(8): 2'-O-methyladenosine
  modified_base (9)..(9): 2'-deoxy-2'-fluoroadenosine
  modified_base (10)..(10): cm
  modified_base (11)..(11): 2'-deoxy-2'-fluoroadenosine
  modified_base (12)..(12): 2'-deoxy-2'-fluorocytidine
  modified_base (13)..(13): gm
  modified_base (14)..(14): 2'-deoxy-2'-fluoroadenosine
  modified_base (15)..(15): um
  modified_base (16)..(16): 2'-deoxy-2'-fluorocytidine
  modified_base (17)..(17): 2'-O-methyladenosine
  modified_base (18)..(18): 2'-deoxy-2'-fluoroguanosine
  modified_base (19)..(19): um
  modified_base (20)..(20): 2'-deoxy-2'-fluorouridine
  modified_base (21)..(21): um
auaucccaacacgaucaguuu

SEQ ID NO: 5617 - RNA, 21 nt, Artificial Sequence
  siRNA sense strand against b2GPI
  modified_base (1)..(1): 2'-deoxy-2'-fluorouridine
  modified_base (2)..(2): 2'-O-methyladenosine
  misc_feature (2)..(3): 5'-phosphonothioate
  modified_base (3)..(3): 2'-deoxy-2'-fluorouridine
  modified_base (4)..(4): cm
  modified_base (5)..(5): 2'-deoxy-2'-fluorocytidine
  modified_base (6)..(6): cm
  modified_base (7)..(7): 2'-deoxy-2'-fluoroadenosine
  modified_base (8)..(8): 2'-O-methyladenosine
  modified_base (9)..(9): 2'-deoxy-2'-fluorocytidine
  modified_base (10)..(10): 2'-O-methyladenosine
  modified_base (11)..(11): 2'-deoxy-2'-fluorocytidine
  modified_base (12)..(12): 2'-deoxy-2'-fluoroguanosine
  modified_base (13)..(13): 2'-O-methyladenosine
  modified_base (14)..(14): 2'-deoxy-2'-fluorouridine
  modified_base (15)..(15): cm
  modified_base (16)..(16): 2'-deoxy-2'-fluoroadenosine
  modified_base (17)..(17): gm
  modified_base (18)..(18): 2'-deoxy-2'-fluorouridine
  modified_base (19)..(19): um
  modified_base (20)..(20): 2'-deoxy-2'-fluorouridine
  modified_base (21)..(21): um
uaucccaacacgaucaguuuu

SEQ ID NO: 5618 - RNA, 21 nt, Artificial Sequence
  siRNA sense strand against b2GPI
  modified_base (1)..(1): 2'-deoxy-2'-fluoroadenosine
  modified_base (2)..(2): um
  misc_feature (2)..(3): 5'-phosphonothioate
  modified_base (3)..(3): 2'-deoxy-2'-fluorocytidine
  modified_base (4)..(4): cm
  modified_base (5)..(5): 2'-deoxy-2'-fluorocytidine
  modified_base (6)..(6): 2'-O-methyladenosine
  modified_base (7)..(7): 2'-deoxy-2'-fluoroadenosine
  modified_base (8)..(8): cm
  modified_base (9)..(9): 2'-deoxy-2'-fluoroadenosine
  modified_base (10)..(10): cm
  modified_base (11)..(11): 2'-deoxy-2'-fluoroguanosine
  modified_base (12)..(12): 2'-deoxy-2'-fluoroadenosine
  modified_base (13)..(13): um
  modified_base (14)..(14): 2'-deoxy-2'-fluorocytidine
  modified_base (15)..(15): 2'-O-methyladenosine
  modified_base (16)..(16): 2'-deoxy-2'-fluoroguanosine
  modified_base (17)..(17): um
  modified_base (18)..(18): 2'-deoxy-2'-fluorouridine
  modified_base (19)..(19): um
  modified_base (20)..(20): 2'-deoxy-2'-fluorouridine
  modified_base (21)..(21): um
aucccaacacgaucaguuuuu

SEQ ID NO: 5619 - RNA, 21 nt, Artificial Sequence
  siRNA sense strand against b2GPI
  modified_base (1)..(1): 2'-deoxy-2'-fluorouridine
  modified_base (2)..(2): cm
  misc_feature (2)..(3): 5'-phosphonothioate
  modified_base (3)..(3): 2'-deoxy-2'-fluorocytidine
  modified_base (4)..(4): cm
  modified_base (5)..(5): 2'-deoxy-2'-fluoroadenosine
  modified_base (6)..(6): 2'-O-methyladenosine
  modified_base (7)..(7): 2'-deoxy-2'-fluorocytidine
  modified_base (8)..(8): 2'-O-methyladenosine
  modified_base (9)..(9): 2'-deoxy-2'-fluorocytidine
  modified_base (10)..(10): gm
  modified_base (11)..(11): 2'-deoxy-2'-fluoroadenosine
  modified_base (12)..(12): 2'-deoxy-2'-fluorouridine
  modified_base (13)..(13): cm
  modified_base (14)..(14): 2'-deoxy-2'-fluoroadenosine
  modified_base (15)..(15): gm
  modified_base (16)..(16): 2'-deoxy-2'-fluorouridine
  modified_base (17)..(17): um
  modified_base (18)..(18): 2'-deoxy-2'-fluorouridine
  modified_base (19)..(19): um
  modified_base (20)..(20): 2'-deoxy-2'-fluorouridine
  modified_base (21)..(21): cm
ucccaacacgaucaguuuuuc

SEQ ID NO: 5620 - RNA, 21 nt, Artificial Sequence
  siRNA sense strand against b2GPI
  modified_base (1)..(1): 2'-deoxy-2'-fluorocytidine
  modified_base (2)..(2): cm
  misc_feature (2)..(3): 5'-phosphonothioate
  modified_base (3)..(3): 2'-deoxy-2'-fluorocytidine
  modified_base (4)..(4): 2'-O-methyladenosine
  modified_base (5)..(5): 2'-deoxy-2'-fluoroadenosine
  modified_base (6)..(6): cm
  modified_base (7)..(7): 2'-deoxy-2'-fluoroadenosine
  modified_base (8)..(8): cm
  modified_base (9)..(9): 2'-deoxy-2'-fluoroguanosine
  modified_base (10)..(10): 2'-O-methyladenosine
  modified_base (11)..(11): 2'-deoxy-2'-fluorouridine
  modified_base (12)..(12): 2'-deoxy-2'-fluorocytidine
  modified_base (13)..(13): 2'-O-methyladenosine
  modified_base (14)..(14): 2'-deoxy-2'-fluoroguanosine
  modified_base (15)..(15): um
  modified_base (16)..(16): 2'-deoxy-2'-fluorouridine
  modified_base (17)..(17): um
  modified_base (18)..(18): 2'-deoxy-2'-fluorouridine
  modified_base (19)..(19): um
  modified_base (20)..(20): 2'-deoxy-2'-fluorocytidine
  modified_base (21)..(21): um
cccaacacgaucaguuuuucu

SEQ ID NO: 5621 - RNA, 21 nt, Artificial Sequence
  siRNA sense strand against b2GPI
  modified_base (1)..(1): 2'-deoxy-2'-fluorocytidine
  modified_base (2)..(2): cm
  misc_feature (2)..(3): 5'-phosphonothioate
  modified_base (3)..(3): 2'-deoxy-2'-fluoroadenosine
  modified_base (4)..(4): 2'-O-methyladenosine
  modified_base (5)..(5): 2'-deoxy-2'-fluorocytidine
  modified_base (6)..(6): 2'-O-methyladenosine
  modified_base (7)..(7): 2'-deoxy-2'-fluorocytidine
  modified_base (8)..(8): gm
  modified_base (9)..(9): 2'-deoxy-2'-fluoroadenosine
  modified_base (10)..(10): um
  modified_base (11)..(11): 2'-deoxy-2'-fluorocytidine
  modified_base (12)..(12): 2'-deoxy-2'-fluoroadenosine
  modified_base (13)..(13): gm
  modified_base (14)..(14): 2'-deoxy-2'-fluorouridine
  modified_base (15)..(15): um
  modified_base (16)..(16): 2'-deoxy-2'-fluorouridine
  modified_base (17)..(17): um
  modified_base (18)..(18): 2'-deoxy-2'-fluorouridine
  modified_base (19)..(19): cm
  modified_base (20)..(20): 2'-deoxy-2'-fluorouridine
  modified_base (21)..(21): um
ccaacacgaucaguuuuucuu

SEQ ID NO: 5622 - RNA, 21 nt, Artificial Sequence
  siRNA sense strand against b2GPI
  modified_base (1)..(1): 2'-deoxy-2'-fluoroadenosine
  modified_base (2)..(2): 2'-O-methyladenosine
  misc_feature (2)..(3): 5'-phosphonothioate
  modified_base (3)..(3): 2'-deoxy-2'-fluorocytidine
  modified_base (4)..(4): 2'-O-methyladenosine
  modified_base (5)..(5): 2'-deoxy-2'-fluorocytidine
  modified_base (6)..(6): gm
  modified_base (7)..(7): 2'-deoxy-2'-fluoroadenosine
  modified_base (8)..(8): um
  modified_base (9)..(9): 2'-deoxy-2'-fluorocytidine
  modified_base (10)..(10): 2'-O-methyladenosine
  modified_base (11)..(11): 2'-deoxy-2'-fluoroguanosine
  modified_base (12)..(12): 2'-deoxy-2'-fluorouridine
  modified_base (13)..(13): um
  modified_base (14)..(14): 2'-deoxy-2'-fluorouridine
  modified_base (15)..(15): um
  modified_base (16)..(16): 2'-deoxy-2'-fluorouridine
  modified_base (17)..(17): cm
  modified_base (18)..(18): 2'-deoxy-2'-fluorouridine
  modified_base (19)..(19): um
  modified_base (20)..(20): 2'-deoxy-2'-fluoroguanosine
  modified_base (21)..(21): um
aacacgaucaguuuuucuugu

SEQ ID NO: 5623 - RNA, 21 nt, Artificial Sequence
  siRNA sense strand against b2GPI
  modified_base (1)..(1): 2'-deoxy-2'-fluoroadenosine
  modified_base (2)..(2): cm
  misc_feature (2)..(3): 5'-phosphonothioate
  modified_base (3)..(3): 2'-deoxy-2'-fluoroadenosine
  modified_base (4)..(4): cm
  modified_base (5)..(5): 2'-deoxy-2'-fluoroguanosine
  modified_base (6)..(6): 2'-O-methyladenosine
  modified_base (7)..(7): 2'-deoxy-2'-fluorouridine
  modified_base (8)..(8): cm
  modified_base (9)..(9): 2'-deoxy-2'-fluoroadenosine
  modified_base (10)..(10): gm
  modified_base (11)..(11): 2'-deoxy-2'-fluorouridine
  modified_base (12)..(12): 2'-deoxy-2'-fluorouridine
  modified_base (13)..(13): um
  modified_base (14)..(14): 2'-deoxy-2'-fluorouridine
  modified_base (15)..(15): um
  modified_base (16)..(16): 2'-deoxy-2'-fluorocytidine
  modified_base (17)..(17): um
  modified_base (18)..(18): 2'-deoxy-2'-fluorouridine
  modified_base (19)..(19): gm
  modified_base (20)..(20): 2'-deoxy-2'-fluorouridine
  modified_base (21)..(21): 2'-O-methyladenosine
acacgaucaguuuuucuugua

SEQ ID NO: 5624 - RNA, 21 nt, Artificial Sequence
  siRNA sense strand against b2GPI
  modified_base (1)..(1): 2'-deoxy-2'-fluorocytidine
  modified_base (2)..(2): 2'-O-methyladenosine
  misc_feature (2)..(3): 5'-phosphonothioate
  modified_base (3)..(3): 2'-deoxy-2'-fluorocytidine
  modified_base (4)..(4): gm
  modified_base (5)..(5): 2'-deoxy-2'-fluoroadenosine
  modified_base (6)..(6): um
  modified_base (7)..(7): 2'-deoxy-2'-fluorocytidine
  modified_base (8)..(8): 2'-O-methyladenosine
  modified_base (9)..(9): 2'-deoxy-2'-fluoroguanosine
  modified_base (10)..(10): um
  modified_base (11)..(11): 2'-deoxy-2'-fluorouridine
  modified_base (12)..(12): 2'-deoxy-2'-fluorouridine
  modified_base (13)..(13): um
  modified_base (14)..(14): 2'-deoxy-2'-fluorouridine
  modified_base (15)..(15): cm
  modified_base (16)..(16): 2'-deoxy-2'-fluorouridine
  modified_base (17)..(17): um
  modified_base (18)..(18): 2'-deoxy-2'-fluoroguanosine
  modified_base (19)..(19): um
  modified_base (20)..(20): 2'-deoxy-2'-fluoroadenosine
  modified_base (21)..(21): 2'-O-methyladenosine
cacgaucaguuuuucuuguaa

SEQ ID NO: 5625 - RNA, 21 nt, Artificial Sequence
  siRNA sense strand against b2GPI
  modified_base (1)..(1): 2'-deoxy-2'-fluoroadenosine
  modified_base (2)..(2): cm
  misc_feature (2)..(3): 5'-phosphonothioate
  modified_base (3)..(3): 2'-deoxy-2'-fluoroguanosine
  modified_base (4)..(4): 2'-O-methyladenosine
  modified_base (5)..(5): 2'-deoxy-2'-fluorouridine
  modified_base (6)..(6): cm
  modified_base (7)..(7): 2'-deoxy-2'-fluoroadenosine
  modified_base (8)..(8): gm
  modified_base (9)..(9): 2'-deoxy-2'-fluorouridine
  modified_base (10)..(10): um
  modified_base (11)..(11): 2'-deoxy-2'-fluorouridine
  modified_base (12)..(12): 2'-deoxy-2'-fluorouridine
  modified_base (13)..(13): um
  modified_base (14)..(14): 2'-deoxy-2'-fluorocytidine
  modified_base (15)..(15): um
  modified_base (16)..(16): 2'-deoxy-2'-fluorouridine
  modified_base (17)..(17): gm
  modified_base (18)..(18): 2'-deoxy-2'-fluorouridine
  modified_base (19)..(19): 2'-O-methyladenosine
  modified_base (20)..(20): 2'-deoxy-2'-fluoroadenosine
  modified_base (21)..(21): cm
acgaucaguuuuucuuguaac

SEQ ID NO: 5626 - RNA, 21 nt, Artificial Sequence
  siRNA sense strand against b2GPI
  modified_base (1)..(1): 2'-deoxy-2'-fluorocytidine
  modified_base (2)..(2): gm
  misc_feature (2)..(3): 5'-phosphonothioate
  modified_base (3)..(3): 2'-deoxy-2'-fluoroadenosine
  modified_base (4)..(4): um
  modified_base (5)..(5): 2'-deoxy-2'-fluorocytidine
  modified_base (6)..(6): 2'-O-methyladenosine
  modified_base (7)..(7): 2'-deoxy-2'-fluoroguanosine
  modified_base (8)..(8): um
  modified_base (9)..(9): 2'-deoxy-2'-fluorouridine
  modified_base (10)..(10): um
  modified_base (11)..(11): 2'-deoxy-2'-fluorouridine
  modified_base (12)..(12): 2'-deoxy-2'-fluorouridine
  modified_base (13)..(13): cm
  modified_base (14)..(14): 2'-deoxy-2'-fluorouridine
  modified_base (15)..(15): um
  modified_base (16)..(16): 2'-deoxy-2'-fluoroguanosine
  modified_base (17)..(17): um
  modified_base (18)..(18): 2'-deoxy-2'-fluoroadenosine
  modified_base (19)..(19): 2'-O-methyladenosine
  modified_base (20)..(20): 2'-deoxy-2'-fluorocytidine
  modified_base (21)..(21): 2'-O-methyladenosine
cgaucaguuuuucuuguaaca

SEQ ID NO: 5627 - RNA, 21 nt, Artificial Sequence
  siRNA sense strand against b2GPI
  modified_base (1)..(1): 2'-deoxy-2'-fluoroadenosine
  modified_base (2)..(2): um
  misc_feature (2)..(3): 5'-phosphonothioate
  modified_base (3)..(3): 2'-deoxy-2'-fluorocytidine
  modified_base (4)..(4): 2'-O-methyladenosine
  modified_base (5)..(5): 2'-deoxy-2'-fluoroguanosine
  modified_base (6)..(6): um
  modified_base (7)..(7): 2'-deoxy-2'-fluorouridine
  modified_base (8)..(8): um
  modified_base (9)..(9): 2'-deoxy-2'-fluorouridine
  modified_base (10)..(10): um
  modified_base (11)..(11): 2'-deoxy-2'-fluorocytidine
  modified_base (12)..(12): 2'-deoxy-2'-fluorouridine
  modified_base (13)..(13): um
  modified_base (14)..(14): 2'-deoxy-2'-fluoroguanosine
  modified_base (15)..(15): um
  modified_base (16)..(16): 2'-deoxy-2'-fluoroadenosine
  modified_base (17)..(17): 2'-O-methyladenosine
  modified_base (18)..(18): 2'-deoxy-2'-fluorocytidine
  modified_base (19)..(19): 2'-O-methyladenosine
  modified_base (20)..(20): 2'-deoxy-2'-fluorocytidine
  modified_base (21)..(21): um
aucaguuuuucuuguaacacu

SEQ ID NO: 5628 - RNA, 21 nt, Artificial Sequence
  siRNA sense strand against b2GPI
  modified_base (1)..(1): 2'-deoxy-2'-fluorouridine
  modified_base (2)..(2): cm
  misc_feature (2)..(3): 5'-phosphonothioate
  modified_base (3)..(3): 2'-deoxy-2'-fluoroadenosine
  modified_base (4)..(4): gm
  modified_base (5)..(5): 2'-deoxy-2'-fluorouridine
  modified_base (6)..(6): um
  modified_base (7)..(7): 2'-deoxy-2'-fluorouridine
  modified_base (8)..(8): um
  modified_base (9)..(9): 2'-deoxy-2'-fluorouridine
  modified_base (10)..(10): cm
  modified_base (11)..(11): 2'-deoxy-2'-fluorouridine
  modified_base (12)..(12): 2'-deoxy-2'-fluorouridine
  modified_base (13)..(13): gm
  modified_base (14)..(14): 2'-deoxy-2'-fluorouridine
  modified_base (15)..(15): 2'-O-methyladenosine
  modified_base (16)..(16): 2'-deoxy-2'-fluoroadenosine
  modified_base (17)..(17): cm
  modified_base (18)..(18): 2'-deoxy-2'-fluoroadenosine
  modified_base (19)..(19): cm
  modified_base (20)..(20): 2'-deoxy-2'-fluorouridine
  modified_base (21)..(21): gm
ucaguuuuucuuguaacacug

SEQ ID NO: 5629 - RNA, 21 nt, Artificial Sequence
  siRNA sense strand against b2GPI
  modified_base (1)..(1): 2'-deoxy-2'-fluorouridine
  modified_base (2)..(2): um
  misc_feature (2)..(3): 5'-phosphonothioate
  modified_base (3)..(3): 2'-deoxy-2'-fluorouridine
  modified_base (4)..(4): cm
  modified_base (5)..(5): 2'-deoxy-2'-fluorouridine
  modified_base (6)..(6): um
  modified_base (7)..(7): 2'-deoxy-2'-fluoroguanosine
  modified_base (8)..(8): um
  modified_base (9)..(9): 2'-deoxy-2'-fluoroadenosine
  modified_base (10)..(10): 2'-O-methyladenosine
  modified_base (11)..(11): 2'-deoxy-2'-fluorocytidine
  modified_base (12)..(12): 2'-deoxy-2'-fluoroadenosine
  modified_base (13)..(13): cm
  modified_base (14)..(14): 2'-deoxy-2'-fluorouridine
  modified_base (15)..(15): gm
  modified_base (16)..(16): 2'-deoxy-2'-fluoroguanosine
  modified_base (17)..(17): gm
  modified_base (18)..(18): 2'-deoxy-2'-fluorouridine
  modified_base (19)..(19): um
  modified_base (20)..(20): 2'-deoxy-2'-fluorouridine
  modified_base (21)..(21): um
uuucuuguaacacuggguuuu

SEQ ID NO: 5630 - RNA, 21 nt, Artificial Sequence
  siRNA sense strand against b2GPI
  modified_base (1)..(1): 2'-deoxy-2'-fluorouridine
  modified_base (2)..(2): um
  misc_feature (2)..(3): 5'-phosphonothioate
  modified_base (3)..(3): 2'-deoxy-2'-fluorocytidine
  modified_base (4)..(4): um
  modified_base (5)..(5): 2'-deoxy-2'-fluorouridine
  modified_base (6)..(6): gm
  modified_base (7)..(7): 2'-deoxy-2'-fluorouridine
  modified_base (8)..(8): 2'-O-methyladenosine
  modified_base (9)..(9): 2'-deoxy-2'-fluoroadenosine
  modified_base (10)..(10): cm
  modified_base (11)..(11): 2'-deoxy-2'-fluoroadenosine
  modified_base (12)..(12): 2'-deoxy-2'-fluorocytidine
  modified_base (13)..(13): um
  modified_base (14)..(14): 2'-deoxy-2'-fluoroguanosine
  modified_base (15)..(15): gm
  modified_base (16)..(16): 2'-deoxy-2'-fluoroguanosine
  modified_base (17)..(17): um
  modified_base (18)..(18): 2'-deoxy-2'-fluorouridine
  modified_base (19)..(19): um
  modified_base (20)..(20): 2'-deoxy-2'-fluorouridine
  modified_base (21)..(21): 2'-O-methyladenosine
uucuuguaacacuggguuuua

SEQ ID NO: 5631 - RNA, 21 nt, Artificial Sequence
  siRNA sense strand against b2GPI
  modified_base (1)..(1): 2'-deoxy-2'-fluorouridine
  modified_base (2)..(2): cm
  misc_feature (2)..(3): 5'-phosphonothioate
  modified_base (3)..(3): 2'-deoxy-2'-fluorouridine
  modified_base (4)..(4): um
  modified_base (5)..(5): 2'-deoxy-2'-fluoroguanosine
  modified_base (6)..(6): um
  modified_base (7)..(7): 2'-deoxy-2'-fluoroadenosine
  modified_base (8)..(8): 2'-O-methyladenosine
  modified_base (9)..(9): 2'-deoxy-2'-fluorocytidine
  modified_base (10)..(10): 2'-O-methyladenosine
  modified_base (11)..(11): 2'-deoxy-2'-fluorocytidine
  modified_base (12)..(12): 2'-deoxy-2'-fluorouridine
  modified_base (13)..(13): gm
  modified_base (14)..(14): 2'-deoxy-2'-fluoroguanosine
  modified_base (15)..(15): gm
  modified_base (16)..(16): 2'-deoxy-2'-fluorouridine
  modified_base (17)..(17): um
  modified_base (18)..(18): 2'-deoxy-2'-fluorouridine
  modified_base (19)..(19): um
  modified_base (20)..(20): 2'-deoxy-2'-fluoroadenosine
  modified_base (21)..(21): um
ucuuguaacacuggguuuuau

SEQ ID NO: 5632 - RNA, 21 nt, Artificial Sequence
  siRNA sense strand against b2GPI
  modified_base (1)..(1): 2'-deoxy-2'-fluorocytidine
  modified_base (2)..(2): um
  misc_feature (2)..(3): 5'-phosphonothioate
  modified_base (3)..(3): 2'-deoxy-2'-fluorouridine
  modified_base (4)..(4): gm
  modified_base (5)..(5): 2'-deoxy-2'-fluorouridine
  modified_base (6)..(6): 2'-O-methyladenosine
  modified_base (7)..(7): 2'-deoxy-2'-fluoroadenosine
  modified_base (8)..(8): cm
  modified_base (9)..(9): 2'-deoxy-2'-fluoroadenosine
  modified_base (10)..(10): cm
  modified_base (11)..(11): 2'-deoxy-2'-fluorouridine
  modified_base (12)..(12): 2'-deoxy-2'-fluoroguanosine
  modified_base (13)..(13): gm
  modified_base (14)..(14): 2'-deoxy-2'-fluoroguanosine
  modified_base (15)..(15): um
  modified_base (16)..(16): 2'-deoxy-2'-fluorouridine
  modified_base (17)..(17): um
  modified_base (18)..(18): 2'-deoxy-2'-fluorouridine
  modified_base (19)..(19): 2'-O-methyladenosine
  modified_base (20)..(20): 2'-deoxy-2'-fluorouridine
  modified_base (21)..(21): cm
cuuguaacacuggguuuuauc

SEQ ID NO: 5633 - RNA, 21 nt, Artificial Sequence
  siRNA sense strand against b2GPI
  modified_base (1)..(1): 2'-deoxy-2'-fluorouridine
  modified_base (2)..(2): um
  misc_feature (2)..(3): 5'-phosphonothioate
  modified_base (3)..(3): 2'-deoxy-2'-fluoroguanosine
  modified_base (4)..(4): um
  modified_base (5)..(5): 2'-deoxy-2'-fluoroadenosine
  modified_base (6)..(6): 2'-O-methyladenosine
  modified_base (7)..(7): 2'-deoxy-2'-fluorocytidine
  modified_base (8)..(8): 2'-O-methyladenosine
  modified_base (9)..(9): 2'-deoxy-2'-fluorocytidine
  modified_base (10)..(10): um
  modified_base (11)..(11): 2'-deoxy-2'-fluoroguanosine
  modified_base (12)..(12): 2'-deoxy-2'-fluoroguanosine
  modified_base (13)..(13): gm
  modified_base (14)..(14): 2'-deoxy-2'-fluorouridine
  modified_base (15)..(15): um
  modified_base (16)..(16): 2'-deoxy-2'-fluorouridine
  modified_base (17)..(17): um
  modified_base (18)..(18): 2'-deoxy-2'-fluoroadenosine
  modified_base (19)..(19): um
  modified_base (20)..(20): 2'-deoxy-2'-fluorocytidine
  modified_base (21)..(21): um
uuguaacacuggguuuuaucu

SEQ ID NO: 5634 - RNA, 21 nt, Artificial Sequence
  siRNA sense strand against b2GPI
  modified_base (1)..(1): 2'-deoxy-2'-fluoroguanosine
  modified_base (2)..(2): um
  misc_feature (2)..(3): 5'-phosphonothioate
  modified_base (3)..(3): 2'-deoxy-2'-fluoroadenosine
  modified_base (4)..(4): 2'-O-methyladenosine
  modified_base (5)..(5): 2'-deoxy-2'-fluorocytidine
  modified_base (6)..(6): 2'-O-methyladenosine
  modified_base (7)..(7): 2'-deoxy-2'-fluorocytidine
  modified_base (8)..(8): um
  modified_base (9)..(9): 2'-deoxy-2'-fluoroguanosine
  modified_base (10)..(10): gm
  modified_base (11)..(11): 2'-deoxy-2'-fluoroguanosine
  modified_base (12)..(12): 2'-deoxy-2'-fluorouridine
  modified_base (13)..(13): um
  modified_base (14)..(14): 2'-deoxy-2'-fluorouridine
  modified_base (15)..(15): um
  modified_base (16)..(16): 2'-deoxy-2'-fluoroadenosine
  modified_base (17)..(17): um
  modified_base (18)..(18): 2'-deoxy-2'-fluorocytidine
  modified_base (19)..(19): um
  modified_base (20)..(20): 2'-deoxy-2'-fluoroguanosine
  modified_base (21)..(21): 2'-O-methyladenosine
guaacacuggguuuuaucuga

SEQ ID NO: 5635 - RNA, 21 nt, Artificial Sequence
  siRNA sense strand against b2GPI
  modified_base (1)..(1): 2'-deoxy-2'-fluorouridine
  modified_base (2)..(2): 2'-O-methyladenosine
  misc_feature (2)..(3): 5'-phosphonothioate
  modified_base (3)..(3): 2'-deoxy-2'-fluoroadenosine
  modified_base (4)..(4): cm
  modified_base (5)..(5): 2'-deoxy-2'-fluoroadenosine
  modified_base (6)..(6): cm
  modified_base (7)..(7): 2'-deoxy-2'-fluorouridine
  modified_base (8)..(8): gm
  modified_base (9)..(9): 2'-deoxy-2'-fluoroguanosine
  modified_base (10)..(10): gm
  modified_base (11)..(11): 2'-deoxy-2'-fluorouridine
  modified_base (12)..(12): 2'-deoxy-2'-fluorouridine
  modified_base (13)..(13): um
  modified_base (14)..(14): 2'-deoxy-2'-fluorouridine
  modified_base (15)..(15): 2'-O-methyladenosine
  modified_base (16)..(16): 2'-deoxy-2'-fluorouridine
  modified_base (17)..(17): cm
  modified_base (18)..(18): 2'-deoxy-2'-fluorouridine
  modified_base (19)..(19): gm
  modified_base (20)..(20): 2'-deoxy-2'-fluoroadenosine
  modified_base (21)..(21): 2'-O-methyladenosine
uaacacuggguuuuaucugaa

SEQ ID NO: 5636 - RNA, 21 nt, Artificial Sequence
  siRNA sense strand against b2GPI
  modified_base (1)..(1): 2'-deoxy-2'-fluoroadenosine
  modified_base (2)..(2): 2'-O-methyladenosine
  misc_feature (2)..(3): 5'-phosphonothioate
  modified_base (3)..(3): 2'-deoxy-2'-fluorocytidine
  modified_base (4)..(4): 2'-O-methyladenosine
  modified_base (5)..(5): 2'-deoxy-2'-fluorocytidine
  modified_base (6)..(6): um
  modified_base (7)..(7): 2'-deoxy-2'-fluoroguanosine
  modified_base (8)..(8): gm
  modified_base (9)..(9): 2'-deoxy-2'-fluoroguanosine
  modified_base (10)..(10): um
  modified_base (11)..(11): 2'-deoxy-2'-fluorouridine
  modified_base (12)..(12): 2'-deoxy-2'-fluorouridine
  modified_base (13)..(13): um
  modified_base (14)..(14): 2'-deoxy-2'-fluoroadenosine
  modified_base (15)..(15): um
  modified_base (16)..(16): 2'-deoxy-2'-fluorocytidine
  modified_base (17)..(17): um
  modified_base (18)..(18): 2'-deoxy-2'-fluoroguanosine
  modified_base (19)..(19): 2'-O-methyladenosine
  modified_base (20)..(20): 2'-deoxy-2'-fluoroadenosine
  modified_base (21)..(21): um
aacacuggguuuuaucugaau

SEQ ID NO: 5637 - RNA, 21 nt, Artificial Sequence
  siRNA sense strand against b2GPI
  modified_base (1)..(1): 2'-deoxy-2'-fluorocytidine
  modified_base (2)..(2): 2'-O-methyladenosine
  misc_feature (2)..(3): 5'-phosphonothioate
  modified_base (3)..(3): 2'-deoxy-2'-fluorocytidine
  modified_base (4)..(4): um
  modified_base (5)..(5): 2'-deoxy-2'-fluoroguanosine
  modified_base (6)..(6): gm
  modified_base (7)..(7): 2'-deoxy-2'-fluoroguanosine
  modified_base (8)..(8): um
  modified_base (9)..(9): 2'-deoxy-2'-fluorouridine
  modified_base (10)..(10): um
  modified_base (11)..(11): 2'-deoxy-2'-fluorouridine
  modified_base (12)..(12): 2'-deoxy-2'-fluoroadenosine
  modified_base (13)..(13): um
  modified_base (14)..(14): 2'-deoxy-2'-fluorocytidine
  modified_base (15)..(15): um
  modified_base (16)..(16): 2'-deoxy-2'-fluoroguanosine
  modified_base (17)..(17): 2'-O-methyladenosine
  modified_base (18)..(18): 2'-deoxy-2'-fluoroadenosine
  modified_base (19)..(19): um
  modified_base (20)..(20): 2'-deoxy-2'-fluoroguanosine
  modified_base (21)..(21): gm
cacuggguuuuaucugaaugg

SEQ ID NO: 5638 - RNA, 21 nt, Artificial Sequence
  siRNA sense strand against b2GPI
  modified_base (1)..(1): 2'-deoxy-2'-fluorocytidine
  modified_base (2)..(2): um
  misc_feature (2)..(3): 5'-phosphonothioate
  modified_base (3)..(3): 2'-deoxy-2'-fluoroguanosine
  modified_base (4)..(4): gm
  modified_base (5)..(5): 2'-deoxy-2'-fluoroguanosine
  modified_base (6)..(6): um
  modified_base (7)..(7): 2'-deoxy-2'-fluorouridine
  modified_base (8)..(8): um
  modified_base (9)..(9): 2'-deoxy-2'-fluorouridine
  modified_base (10)..(10): 2'-O-methyladenosine
  modified_base (11)..(11): 2'-deoxy-2'-fluorouridine
  modified_base (12)..(12): 2'-deoxy-2'-fluorocytidine
  modified_base (13)..(13): um
  modified_base (14)..(14): 2'-deoxy-2'-fluoroguanosine
  modified_base (15)..(15): 2'-O-methyladenosine
  modified_base (16)..(16): 2'-deoxy-2'-fluoroadenosine
  modified_base (17)..(17): um
  modified_base (18)..(18): 2'-deoxy-2'-fluoroguanosine
  modified_base (19)..(19): gm
  modified_base (20)..(20): 2'-deoxy-2'-fluorocytidine
  modified_base (21)..(21): gm
cuggguuuuaucugaauggcg

SEQ ID NO: 5639 - RNA, 21 nt, Artificial Sequence
  siRNA sense strand against b2GPI
  modified_base (1)..(1): 2'-deoxy-2'-fluorouridine
  modified_base (2)..(2): gm
  misc_feature (2)..(3): 5'-phosphonothioate
  modified_base (3)..(3): 2'-deoxy-2'-fluoroguanosine
  modified_base (4)..(4): gm
  modified_base (5)..(5): 2'-deoxy-2'-fluorouridine
  modified_base (6)..(6): um
  modified_base (7)..(7): 2'-deoxy-2'-fluorouridine
  modified_base (8)..(8): um
  modified_base (9)..(9): 2'-deoxy-2'-fluoroadenosine
  modified_base (10)..(10): um
  modified_base (11)..(11): 2'-deoxy-2'-fluorocytidine
  modified_base (12)..(12): 2'-deoxy-2'-fluorouridine
  modified_base (13)..(13): gm
  modified_base (14)..(14): 2'-deoxy-2'-fluoroadenosine
  modified_base (15)..(15): 2'-O-methyladenosine
  modified_base (16)..(16): 2'-deoxy-2'-fluorouridine
  modified_base (17)..(17): gm
  modified_base (18)..(18): 2'-deoxy-2'-fluoroguanosine
  modified_base (19)..(19): cm
  modified_base (20)..(20): 2'-deoxy-2'-fluoroguanosine
  modified_base (21)..(21): cm
uggguuuuaucugaauggcgc

SEQ ID NO: 5640 - RNA, 21 nt, Artificial Sequence
  siRNA sense strand against b2GPI
  modified_base (1)..(1): 2'-deoxy-2'-fluoroguanosine
  modified_base (2)..(2): gm
  misc_feature (2)..(3): 5'-phosphonothioate
  modified_base (3)..(3): 2'-deoxy-2'-fluoroguanosine
  modified_base (4)..(4): um
  modified_base (5)..(5): 2'-deoxy-2'-fluorouridine
  modified_base (6)..(6): um
  modified_base (7)..(7): 2'-deoxy-2'-fluorouridine
  modified_base (8)..(8): 2'-O-methyladenosine
  modified_base (9)..(9): 2'-deoxy-2'-fluorouridine
  modified_base (10)..(10): cm
  modified_base (11)..(11): 2'-deoxy-2'-fluorouridine
  modified_base (12)..(12): 2'-deoxy-2'-fluoroguanosine
  modified_base (13)..(13): 2'-O-methyladenosine
  modified_base (14)..(14): 2'-deoxy-2'-fluoroadenosine
  modified_base (15)..(15): um
  modified_base (16)..(16): 2'-deoxy-2'-fluoroguanosine
  modified_base (17)..(17): gm
  modified_base (18)..(18): 2'-deoxy-2'-fluorocytidine
  modified_base (19)..(19): gm
  modified_base (20)..(20): 2'-deoxy-2'-fluorocytidine
  modified_base (21)..(21): um
ggguuuuaucugaauggcgcu

SEQ ID NO: 5641 - RNA, 21 nt, Artificial Sequence
  siRNA sense strand against b2GPI
  modified_base (1)..(1): 2'-deoxy-2'-fluorouridine
  modified_base (2)..(2): um
  misc_feature (2)..(3): 5'-phosphonothioate
  modified_base (3)..(3): 2'-deoxy-2'-fluorouridine
  modified_base (4)..(4): um
  modified_base (5)..(5): 2'-deoxy-2'-fluoroadenosine
  modified_base (6)..(6): um
  modified_base (7)..(7): 2'-deoxy-2'-fluorocytidine
  modified_base (8)..(8): um
  modified_base (9)..(9): 2'-deoxy-2'-fluoroguanosine
  modified_base (10)..(10): 2'-O-methyladenosine
  modified_base (11)..(11): 2'-deoxy-2'-fluoroadenosine
  modified_base (12)..(12): 2'-deoxy-2'-fluorouridine
  modified_base (13)..(13): gm
  modified_base (14)..(14): 2'-deoxy-2'-fluoroguanosine
  modified_base (15)..(15): cm
  modified_base (16)..(16): 2'-deoxy-2'-fluoroguanosine
  modified_base (17)..(17): cm
  modified_base (18)..(18): 2'-deoxy-2'-fluorouridine
  modified_base (19)..(19): gm
  modified_base (20)..(20): 2'-deoxy-2'-fluoroadenosine
  modified_base (21)..(21): um
uuuuaucugaauggcgcugau

SEQ ID NO: 5642 - RNA, 21 nt, Artificial Sequence
  siRNA sense strand against b2GPI
  modified_base (1)..(1): 2'-deoxy-2'-fluorouridine
  modified_base (2)..(2): 2'-O-methyladenosine
  misc_feature (2)..(3): 5'-phosphonothioate
  modified_base (3)..(3): 2'-deoxy-2'-fluorouridine
  modified_base (4)..(4): cm
  modified_base (5)..(5): 2'-deoxy-2'-fluorouridine
  modified_base (6)..(6): gm
  modified_base (7)..(7): 2'-deoxy-2'-fluoroadenosine
  modified_base (8)..(8): 2'-O-methyladenosine
  modified_base (9)..(9): 2'-deoxy-2'-fluorouridine
  modified_base (10)..(10): gm
  modified_base (11)..(11): 2'-deoxy-2'-fluoroguanosine
  modified_base (12)..(12): 2'-deoxy-2'-fluorocytidine
  modified_base (13)..(13): gm
  modified_base (14)..(14): 2'-deoxy-2'-fluorocytidine
  modified_base (15)..(15): um
  modified_base (16)..(16): 2'-deoxy-2'-fluoroguanosine
  modified_base (17)..(17): 2'-O-methyladenosine
  modified_base (18)..(18): 2'-deoxy-2'-fluorouridine
  modified_base (19)..(19): um
  modified_base (20)..(20): 2'-deoxy-2'-fluorocytidine
  modified_base (21)..(21): um
uaucugaauggcgcugauucu

SEQ ID NO: 5643 - RNA, 21 nt, Artificial Sequence
  siRNA sense strand against b2GPI
  modified_base (1)..(1): 2'-deoxy-2'-fluorouridine
  modified_base (2)..(2): gm
  misc_feature (2)..(3): 5'-phosphonothioate
  modified_base (3)..(3): 2'-deoxy-2'-fluoroadenosine
  modified_base (4)..(4): 2'-O-methyladenosine
  modified_base (5)..(5): 2'-deoxy-2'-fluorouridine
  modified_base (6)..(6): gm
  modified_base (7)..(7): 2'-deoxy-2'-fluoroguanosine
  modified_base (8)..(8): cm
  modified_base (9)..(9): 2'-deoxy-2'-fluoroguanosine
  modified_base (10)..(10): cm
  modified_base (11)..(11): 2'-deoxy-2'-fluorouridine
  modified_base (12)..(12): 2'-deoxy-2'-fluoroguanosine
  modified_base (13)..(13): 2'-O-methyladenosine
  modified_base (14)..(14): 2'-deoxy-2'-fluorouridine
  modified_base (15)..(15): um
  modified_base (16)..(16): 2'-deoxy-2'-fluorocytidine
  modified_base (17)..(17): um
  modified_base (18)..(18): 2'-deoxy-2'-fluoroguanosine
  modified_base (19)..(19): cm
  modified_base (20)..(20): 2'-deoxy-2'-fluorocytidine
  modified_base (21)..(21): 2'-O-methyladenosine
ugaauggcgcugauucugcca

SEQ ID NO: 5644 - RNA, 21 nt, Artificial Sequence
  siRNA sense strand against b2GPI
  modified_base (1)..(1): 2'-deoxy-2'-fluoroadenosine
  modified_base (2)..(2): um
  misc_feature (2)..(3): 5'-phosphonothioate
  modified_base (3)..(3): 2'-deoxy-2'-fluoroguanosine
  modified_base (4)..(4): gm
  modified_base (5)..(5): 2'-deoxy-2'-fluorocytidine
  modified_base (6)..(6): gm
  modified_base (7)..(7): 2'-deoxy-2'-fluorocytidine
  modified_base (8)..(8): um
  modified_base (9)..(9): 2'-deoxy-2'-fluoroguanosine
  modified_base (10)..(10): 2'-O-methyladenosine
  modified_base (11)..(11): 2'-deoxy-2'-fluorouridine
  modified_base (12)..(12): 2'-deoxy-2'-fluorouridine
  modified_base (13)..(13): cm
  modified_base (14)..(14): 2'-deoxy-2'-fluorouridine
  modified_base (15)..(15): gm
  modified_base (16)..(16): 2'-deoxy-2'-fluorocytidine
  modified_base (17)..(17): cm
  modified_base (18)..(18): 2'-deoxy-2'-fluoroadenosine
  modified_base (19)..(19): 2'-O-methyladenosine
  modified_base (20)..(20): 2'-deoxy-2'-fluoroguanosine
  modified_base (21)..(21): um
auggcgcugauucugccaagu

SEQ ID NO: 5645 - RNA, 21 nt, Artificial Sequence
  siRNA sense strand against b2GPI
  modified_base (1)..(1): 2'-deoxy-2'-fluorouridine
  modified_base (2)..(2): gm
  misc_feature (2)..(3): 5'-phosphonothioate
  modified_base (3)..(3): 2'-deoxy-2'-fluoroguanosine
  modified_base (4)..(4): cm
  modified_base (5)..(5): 2'-deoxy-2'-fluoroguanosine
  modified_base (6)..(6): cm
  modified_base (7)..(7): 2'-deoxy-2'-fluorouridine
  modified_base (8)..(8): gm
  modified_base (9)..(9): 2'-deoxy-2'-fluoroadenosine
  modified_base (10)..(10): um
  modified_base (11)..(11): 2'-deoxy-2'-fluorouridine
  modified_base (12)..(12): 2'-deoxy-2'-fluorocytidine
  modified_base (13)..(13): um
  modified_base (14)..(14): 2'-deoxy-2'-fluoroguanosine
  modified_base (15)..(15): cm
  modified_base (16)..(16): 2'-deoxy-2'-fluorocytidine
  modified_base (17)..(17): 2'-O-methyladenosine
  modified_base (18)..(18): 2'-deoxy-2'-fluoroadenosine
  modified_base (19)..(19): gm
  modified_base (20)..(20): 2'-deoxy-2'-fluorouridine
  modified_base (21)..(21): gm
uggcgcugauucugccaagug

SEQ ID NO: 5646 - RNA, 21 nt, Artificial Sequence
  siRNA sense strand against b2GPI
  modified_base (1)..(1): 2'-deoxy-2'-fluoroguanosine
  modified_base (2)..(2): gm
  misc_feature (2)..(3): 5'-phosphonothioate
  modified_base (3)..(3): 2'-deoxy-2'-fluorocytidine
  modified_base (4)..(4): gm
  modified_base (5)..(5): 2'-deoxy-2'-fluorocytidine
  modified_base (6)..(6): um
  modified_base (7)..(7): 2'-deoxy-2'-fluoroguanosine
  modified_base (8)..(8): 2'-O-methyladenosine
  modified_base (9)..(9): 2'-deoxy-2'-fluorouridine
  modified_base (10)..(10): um
  modified_base (11)..(11): 2'-deoxy-2'-fluorocytidine
  modified_base (12)..(12): 2'-deoxy-2'-fluorouridine
  modified_base (13)..(13): gm
  modified_base (14)..(14): 2'-deoxy-2'-fluorocytidine
  modified_base (15)..(15): cm
  modified_base (16)..(16): 2'-deoxy-2'-fluoroadenosine
  modified_base (17)..(17): 2'-O-methyladenosine
  modified_base (18)..(18): 2'-deoxy-2'-fluoroguanosine
  modified_base (19)..(19): um
  modified_base (20)..(20): 2'-deoxy-2'-fluoroguanosine
  modified_base (21)..(21): cm
ggcgcugauucugccaagugc

SEQ ID NO: 5647 - RNA, 21 nt, Artificial Sequence
  siRNA sense strand against b2GPI
  modified_base (1)..(1): 2'-deoxy-2'-fluoroguanosine
  modified_base (2)..(2): cm
  misc_feature (2)..(3): 5'-phosphonothioate
  modified_base (3)..(3): 2'-deoxy-2'-fluoroguanosine
  modified_base (4)..(4): cm
  modified_base (5)..(5): 2'-deoxy-2'-fluorouridine
  modified_base (6)..(6): gm
  modified_base (7)..(7): 2'-deoxy-2'-fluoroadenosine
  modified_base (8)..(8): um
  modified_base (9)..(9): 2'-deoxy-2'-fluorouridine
  modified_base (10)..(10): cm
  modified_base (11)..(11): 2'-deoxy-2'-fluorouridine
  modified_base (12)..(12): 2'-deoxy-2'-fluoroguanosine
  modified_base (13)..(13): cm
  modified_base (14)..(14): 2'-deoxy-2'-fluorocytidine
  modified_base (15)..(15): 2'-O-methyladenosine
  modified_base (16)..(16): 2'-deoxy-2'-fluoroadenosine
  modified_base (17)..(17): gm
  modified_base (18)..(18): 2'-deoxy-2'-fluorouridine
  modified_base (19)..(19): gm
  modified_base (20)..(20): 2'-deoxy-2'-fluorocytidine
  modified_base (21)..(21): 2'-O-methyladenosine
gcgcugauucugccaagugca

SEQ ID NO: 5648 - RNA, 21 nt, Artificial Sequence
  siRNA sense strand against b2GPI
  modified_base (1)..(1): 2'-deoxy-2'-fluorocytidine
  modified_base (2)..(2): gm
  misc_feature (2)..(3): 5'-phosphonothioate
  modified_base (3)..(3): 2'-deoxy-2'-fluorocytidine
  modified_base (4)..(4): um
  modified_base (5)..(5): 2'-deoxy-2'-fluoroguanosine
  modified_base (6)..(6): 2'-O-methyladenosine
  modified_base (7)..(7): 2'-deoxy-2'-fluorouridine
  modified_base (8)..(8): um
  modified_base (9)..(9): 2'-deoxy-2'-fluorocytidine
  modified_base (10)..(10): um
  modified_base (11)..(11): 2'-deoxy-2'-fluoroguanosine
  modified_base (12)..(12): 2'-deoxy-2'-fluorocytidine
  modified_base (13)..(13): cm
  modified_base (14)..(14): 2'-deoxy-2'-fluoroadenosine
  modified_base (15)..(15): 2'-O-methyladenosine
  modified_base (16)..(16): 2'-deoxy-2'-fluoroguanosine
  modified_base (17)..(17): um
  modified_base (18)..(18): 2'-deoxy-2'-fluoroguanosine
  modified_base (19)..(19): cm
  modified_base (20)..(20): 2'-deoxy-2'-fluoroadenosine
  modified_base (21)..(21): cm
cgcugauucugccaagugcac

SEQ ID NO: 5649 - RNA, 21 nt, Artificial Sequence
  siRNA sense strand against b2GPI
  modified_base (1)..(1): 2'-deoxy-2'-fluoroguanosine
  modified_base (2)..(2): cm
  misc_feature (2)..(3): 5'-phosphonothioate
  modified_base (3)..(3): 2'-deoxy-2'-fluorouridine
  modified_base (4)..(4): gm
  modified_base (5)..(5): 2'-deoxy-2'-fluoroadenosine
  modified_base (6)..(6): um
  modified_base (7)..(7): 2'-deoxy-2'-fluorouridine
  modified_base (8)..(8): cm
  modified_base (9)..(9): 2'-deoxy-2'-fluorouridine
  modified_base (10)..(10): gm
  modified_base (11)..(11): 2'-deoxy-2'-fluorocytidine
  modified_base (12)..(12): 2'-deoxy-2'-fluorocytidine
  modified_base (13)..(13): 2'-O-methyladenosine
  modified_base (14)..(14): 2'-deoxy-2'-fluoroadenosine
  modified_base (15)..(15): gm
  modified_base (16)..(16): 2'-deoxy-2'-fluorouridine
  modified_base (17)..(17): gm
  modified_base (18)..(18): 2'-deoxy-2'-fluorocytidine
  modified_base (19)..(19): 2'-O-methyladenosine
  modified_base (20)..(20): 2'-deoxy-2'-fluorocytidine
  modified_base (21)..(21): um
gcugauucugccaagugcacu

SEQ ID NO: 5650 - RNA, 21 nt, Artificial Sequence
  siRNA sense strand against b2GPI
  modified_base (1)..(1): 2'-deoxy-2'-fluorocytidine
  modified_base (2)..(2): um
  misc_feature (2)..(3): 5'-phosphonothioate
  modified_base (3)..(3): 2'-deoxy-2'-fluoroguanosine
  modified_base (4)..(4): 2'-O-methyladenosine
  modified_base (5)..(5): 2'-deoxy-2'-fluorouridine
  modified_base (6)..(6): um
  modified_base (7)..(7): 2'-deoxy-2'-fluorocytidine
  modified_base (8)..(8): um
  modified_base (9)..(9): 2'-deoxy-2'-fluoroguanosine
  modified_base (10)..(10): cm
  modified_base (11)..(11): 2'-deoxy-2'-fluorocytidine
  modified_base (12)..(12): 2'-deoxy-2'-fluoroadenosine
  modified_base (13)..(13): 2'-O-methyladenosine
  modified_base (14)..(14): 2'-deoxy-2'-fluoroguanosine
  modified_base (15)..(15): um
  modified_base (16)..(16): 2'-deoxy-2'-fluoroguanosine
  modified_base (17)..(17): cm
  modified_base (18)..(18): 2'-deoxy-2'-fluoroadenosine
  modified_base (19)..(19): cm
  modified_base (20)..(20): 2'-deoxy-2'-fluorouridine
  modified_base (21)..(21): gm
cugauucugccaagugcacug

SEQ ID NO: 5651 - RNA, 21 nt, Artificial Sequence
  siRNA sense strand against b2GPI
  modified_base (1)..(1): 2'-deoxy-2'-fluorouridine
  modified_base (2)..(2): um
  misc_feature (2)..(3): 5'-phosphonothioate
  modified_base (3)..(3): 2'-deoxy-2'-fluorocytidine
  modified_base (4)..(4): um
  modified_base (5)..(5): 2'-deoxy-2'-fluoroguanosine
  modified_base (6)..(6): cm
  modified_base (7)..(7): 2'-deoxy-2'-fluorocytidine
  modified_base (8)..(8): 2'-O-methyladenosine
  modified_base (9)..(9): 2'-deoxy-2'-fluoroadenosine
  modified_base (10)..(10): gm
  modified_base (11)..(11): 2'-deoxy-2'-fluorouridine
  modified_base (12)..(12): 2'-deoxy-2'-fluoroguanosine
  modified_base (13)..(13): cm
  modified_base (14)..(14): 2'-deoxy-2'-fluoroadenosine
  modified_base (15)..(15): cm
  modified_base (16)..(16): 2'-deoxy-2'-fluorouridine
  modified_base (17)..(17): gm
  modified_base (18)..(18): 2'-deoxy-2'-fluoroadenosine
  modified_base (19)..(19): gm
  modified_base (20)..(20): 2'-deoxy-2'-fluoroguanosine
  modified_base (21)..(21): 2'-O-methyladenosine
uucugccaagugcacugagga

SEQ ID NO: 5652 - RNA, 21 nt, Artificial Sequence
  siRNA sense strand against b2GPI
  modified_base (1)..(1): 2'-deoxy-2'-fluorouridine
  modified_base (2)..(2): cm
  misc_feature (2)..(3): 5'-phosphonothioate
  modified_base (3)..(3): 2'-deoxy-2'-fluorouridine
  modified_base (4)..(4): gm
  modified_base (5)..(5): 2'-deoxy-2'-fluorocytidine
  modified_base (6)..(6): cm
  modified_base (7)..(7): 2'-deoxy-2'-fluoroadenosine
  modified_base (8)..(8): 2'-O-methyladenosine
  modified_base (9)..(9): 2'-deoxy-2'-fluoroguanosine
  modified_base (10)..(10): um
  modified_base (11)..(11): 2'-deoxy-2'-fluoroguanosine
  modified_base (12)..(12): 2'-deoxy-2'-fluorocytidine
  modified_base (13)..(13): 2'-O-methyladenosine
  modified_base (14)..(14): 2'-deoxy-2'-fluorocytidine
  modified_base (15)..(15): um
  modified_base (16)..(16): 2'-deoxy-2'-fluoroguanosine
  modified_base (17)..(17): 2'-O-methyladenosine
  modified_base (18)..(18): 2'-deoxy-2'-fluoroguanosine
  modified_base (19)..(19): gm
  modified_base (20)..(20): 2'-deoxy-2'-fluoroadenosine
  modified_base (21)..(21): 2'-O-methyladenosine
ucugccaagugcacugaggaa

SEQ ID NO: 5653 - RNA, 21 nt, Artificial Sequence
  siRNA sense strand against b2GPI
  modified_base (1)..(1): 2'-deoxy-2'-fluorouridine
  modified_base (2)..(2): gm
  misc_feature (2)..(3): 5'-phosphonothioate
  modified_base (3)..(3): 2'-deoxy-2'-fluorocytidine
  modified_base (4)..(4): cm
  modified_base (5)..(5): 2'-deoxy-2'-fluoroadenosine
  modified_base (6)..(6): 2'-O-methyladenosine
  modified_base (7)..(7): 2'-deoxy-2'-fluoroguanosine
  modified_base (8)..(8): um
  modified_base (9)..(9): 2'-deoxy-2'-fluoroguanosine
  modified_base (10)..(10): cm
  modified_base (11)..(11): 2'-deoxy-2'-fluoroadenosine
  modified_base (12)..(12): 2'-deoxy-2'-fluorocytidine
  modified_base (13)..(13): um
  modified_base (14)..(14): 2'-deoxy-2'-fluoroguanosine
  modified_base (15)..(15): 2'-O-methyladenosine
  modified_base (16)..(16): 2'-deoxy-2'-fluoroguanosine
  modified_base (17)..(17): gm
  modified_base (18)..(18): 2'-deoxy-2'-fluoroadenosine
  modified_base (19)..(19): 2'-O-methyladenosine
  modified_base (20)..(20): 2'-deoxy-2'-fluoroguanosine
  modified_base (21)..(21): gm
ugccaagugcacugaggaagg

SEQ ID NO: 5654 - RNA, 21 nt, Artificial Sequence
  siRNA sense strand against b2GPI
  modified_base (1)..(1): 2'-deoxy-2'-fluoroguanosine
  modified_base (2)..(2): cm
  misc_feature (2)..(3): 5'-phosphonothioate
  modified_base (3)..(3): 2'-deoxy-2'-fluorocytidine
  modified_base (4)..(4): 2'-O-methyladenosine
  modified_base (5)..(5): 2'-deoxy-2'-fluoroadenosine
  modified_base (6)..(6): gm
  modified_base (7)..(7): 2'-deoxy-2'-fluorouridine
  modified_base (8)..(8): gm
  modified_base (9)..(9): 2'-deoxy-2'-fluorocytidine
  modified_base (10)..(10): 2'-O-methyladenosine
  modified_base (11)..(11): 2'-deoxy-2'-fluorocytidine
  modified_base (12)..(12): 2'-deoxy-2'-fluorouridine
  modified_base (13)..(13): gm
  modified_base (14)..(14): 2'-deoxy-2'-fluoroadenosine
  modified_base (15)..(15): gm
  modified_base (16)..(16): 2'-deoxy-2'-fluoroguanosine
  modified_base (17)..(17): 2'-O-methyladenosine
  modified_base (18)..(18): 2'-deoxy-2'-fluoroadenosine
  modified_base (19)..(19): gm
  modified_base (20)..(20): 2'-deoxy-2'-fluoroguanosine
  modified_base (21)..(21): 2'-O-methyladenosine
gccaagugcacugaggaagga

SEQ ID NO: 5655 - RNA, 21 nt, Artificial Sequence
  siRNA sense strand against b2GPI
  modified_base (1)..(1): 2'-deoxy-2'-fluorocytidine
  modified_base (2)..(2): cm
  misc_feature (2)..(3): 5'-phosphonothioate
  modified_base (3)..(3): 2'-deoxy-2'-fluoroadenosine
  modified_base (4)..(4): 2'-O-methyladenosine
  modified_base (5)..(5): 2'-deoxy-2'-fluoroguanosine
  modified_base (6)..(6): um
  modified_base (7)..(7): 2'-deoxy-2'-fluoroguanosine
  modified_base (8)..(8): cm
  modified_base (9)..(9): 2'-deoxy-2'-fluoroadenosine
  modified_base (10)..(10): cm
  modified_base (11)..(11): 2'-deoxy-2'-fluorouridine
  modified_base (12)..(12): 2'-deoxy-2'-fluoroguanosine
  modified_base (13)..(13): 2'-O-methyladenosine
  modified_base (14)..(14): 2'-deoxy-2'-fluoroguanosine
  modified_base (15)..(15): gm
  modified_base (16)..(16): 2'-deoxy-2'-fluoroadenosine
  modified_base (17)..(17): 2'-O-methyladenosine
  modified_base (18)..(18): 2'-deoxy-2'-fluoroguanosine
  modified_base (19)..(19): gm
  modified_base (20)..(20): 2'-deoxy-2'-fluoroadenosine
  modified_base (21)..(21): 2'-O-methyladenosine
ccaagugcacugaggaaggaa

SEQ ID NO: 5656 - RNA, 21 nt, Artificial Sequence
  siRNA sense strand against b2GPI
  modified_base (1)..(1): 2'-deoxy-2'-fluorocytidine
  modified_base (2)..(2): 2'-O-methyladenosine
  misc_feature (2)..(3): 5'-phosphonothioate
  modified_base (3)..(3): 2'-deoxy-2'-fluoroadenosine
  modified_base (4)..(4): gm
  modified_base (5)..(5): 2'-deoxy-2'-fluorouridine
  modified_base (6)..(6): gm
  modified_base (7)..(7): 2'-deoxy-2'-fluorocytidine
  modified_base (8)..(8): 2'-O-methyladenosine
  modified_base (9)..(9): 2'-deoxy-2'-fluorocytidine
  modified_base (10)..(10): um
  modified_base (11)..(11): 2'-deoxy-2'-fluoroguanosine
  modified_base (12)..(12): 2'-deoxy-2'-fluoroadenosine
  modified_base (13)..(13): gm
  modified_base (14)..(14): 2'-deoxy-2'-fluoroguanosine
  modified_base (15)..(15): 2'-O-methyladenosine
  modified_base (16)..(16): 2'-deoxy-2'-fluoroadenosine
  modified_base (17)..(17): gm
  modified_base (18)..(18): 2'-deoxy-2'-fluoroguanosine
  modified_base (19)..(19): 2'-O-methyladenosine
  modified_base (20)..(20): 2'-deoxy-2'-fluoroadenosine
  modified_base (21)..(21): 2'-O-methyladenosine
caagugcacugaggaaggaaa

SEQ ID NO: 5657 - RNA, 21 nt, Artificial Sequence
  siRNA sense strand against b2GPI
  modified_base (1)..(1): 2'-deoxy-2'-fluoroadenosine
  modified_base (2)..(2): 2'-O-methyladenosine
  misc_feature (2)..(3): 5'-phosphonothioate
  modified_base (3)..(3): 2'-deoxy-2'-fluoroguanosine
  modified_base (4)..(4): um
  modified_base (5)..(5): 2'-deoxy-2'-fluoroguanosine
  modified_base (6)..(6): cm
  modified_base (7)..(7): 2'-deoxy-2'-fluoroadenosine
  modified_base (8)..(8): cm
  modified_base (9)..(9): 2'-deoxy-2'-fluorouridine
  modified_base (10)..(10): gm
  modified_base (11)..(11): 2'-deoxy-2'-fluoroadenosine
  modified_base (12)..(12): 2'-deoxy-2'-fluoroguanosine
  modified_base (13)..(13): gm
  modified_base (14)..(14): 2'-deoxy-2'-fluoroadenosine
  modified_base (15)..(15): 2'-O-methyladenosine
  modified_base (16)..(16): 2'-deoxy-2'-fluoroguanosine
  modified_base (17)..(17): gm
  modified_base (18)..(18): 2'-deoxy-2'-fluoroadenosine
  modified_base (19)..(19): 2'-O-methyladenosine
  modified_base (20)..(20): 2'-deoxy-2'-fluoroadenosine
  modified_base (21)..(21): 2'-O-methyladenosine
aagugcacugaggaaggaaaa

SEQ ID NO: 5658 - RNA, 21 nt, Artificial Sequence
  siRNA sense strand against b2GPI
  modified_base (1)..(1): 2'-deoxy-2'-fluoroadenosine
  modified_base (2)..(2): gm
  misc_feature (2)..(3): 5'-phosphonothioate
  modified_base (3)..(3): 2'-deoxy-2'-fluorouridine
  modified_base (4)..(4): gm
  modified_base (5)..(5): 2'-deoxy-2'-fluorocytidine
  modified_base (6)..(6): 2'-O-methyladenosine
  modified_base (7)..(7): 2'-deoxy-2'-fluorocytidine
  modified_base (8)..(8): um
  modified_base (9)..(9): 2'-deoxy-2'-fluoroguanosine
  modified_base (10)..(10): 2'-O-methyladenosine
  modified_base (11)..(11): 2'-deoxy-2'-fluoroguanosine
  modified_base (12)..(12): 2'-deoxy-2'-fluoroguanosine
  modified_base (13)..(13): 2'-O-methyladenosine
  modified_base (14)..(14): 2'-deoxy-2'-fluoroadenosine
  modified_base (15)..(15): gm
  modified_base (16)..(16): 2'-deoxy-2'-fluoroguanosine
  modified_base (17)..(17): 2'-O-methyladenosine
  modified_base (18)..(18): 2'-deoxy-2'-fluoroadenosine
  modified_base (19)..(19): 2'-O-methyladenosine
  modified_base (20)..(20): 2'-deoxy-2'-fluoroadenosine
  modified_base (21)..(21): um
agugcacugaggaaggaaaau

SEQ ID NO: 5659 - RNA, 21 nt, Artificial Sequence
  siRNA sense strand against b2GPI
  modified_base (1)..(1): 2'-deoxy-2'-fluoroadenosine
  modified_base (2)..(2): gm
  misc_feature (2)..(3): 5'-phosphonothioate
  modified_base (3)..(3): 2'-deoxy-2'-fluoroguanosine
  modified_base (4)..(4): 2'-O-methyladenosine
  modified_base (5)..(5): 2'-deoxy-2'-fluoroadenosine
  modified_base (6)..(6): gm
  modified_base (7)..(7): 2'-deoxy-2'-fluoroguanosine
  modified_base (8)..(8): 2'-O-methyladenosine
  modified_base (9)..(9): 2'-deoxy-2'-fluoroadenosine
  modified_base (10)..(10): 2'-O-methyladenosine
  modified_base (11)..(11): 2'-deoxy-2'-fluoroadenosine
  modified_base (12)..(12): 2'-deoxy-2'-fluorouridine
  modified_base (13)..(13): gm
  modified_base (14)..(14): 2'-deoxy-2'-fluoroguanosine
  modified_base (15)..(15): 2'-O-methyladenosine
  modified_base (16)..(16): 2'-deoxy-2'-fluoroguanosine
  modified_base (17)..(17): cm
  modified_base (18)..(18): 2'-deoxy-2'-fluorocytidine
  modified_base (19)..(19): cm
  modified_base (20)..(20): 2'-deoxy-2'-fluoroguanosine
  modified_base (21)..(21): gm
aggaaggaaaauggagcccgg

SEQ ID NO: 5660 - RNA, 21 nt, Artificial Sequence
  siRNA sense strand against b2GPI
  modified_base (1)..(1): 2'-deoxy-2'-fluoroguanosine
  modified_base (2)..(2): 2'-O-methyladenosine
  misc_feature (2)..(3): 5'-phosphonothioate
  modified_base (3)..(3): 2'-deoxy-2'-fluoroguanosine
  modified_base (4)..(4): cm
  modified_base (5)..(5): 2'-deoxy-2'-fluorocytidine
  modified_base (6)..(6): cm
  modified_base (7)..(7): 2'-deoxy-2'-fluoroguanosine
  modified_base (8)..(8): gm
  modified_base (9)..(9): 2'-deoxy-2'-fluoroadenosine
  modified_base (10)..(10): gm
  modified_base (11)..(11): 2'-deoxy-2'-fluorocytidine
  modified_base (12)..(12): 2'-deoxy-2'-fluorouridine
  modified_base (13)..(13): um
  modified_base (14)..(14): 2'-deoxy-2'-fluorocytidine
  modified_base (15)..(15): cm
  modified_base (16)..(16): 2'-deoxy-2'-fluorouridine
  modified_base (17)..(17): gm
  modified_base (18)..(18): 2'-deoxy-2'-fluorouridine
  modified_base (19)..(19): cm
  modified_base (20)..(20): 2'-deoxy-2'-fluorouridine
  modified_base (21)..(21): gm
gagcccggagcuuccugucug

SEQ ID NO: 5661 - RNA, 21 nt, Artificial Sequence
  siRNA sense strand against b2GPI
  modified_base (1)..(1): 2'-deoxy-2'-fluoroadenosine
  modified_base (2)..(2): gm
  misc_feature (2)..(3): 5'-phosphonothioate
  modified_base (3)..(3): 2'-deoxy-2'-fluorocytidine
  modified_base (4)..(4): cm
  modified_base (5)..(5): 2'-deoxy-2'-fluorocytidine
  modified_base (6)..(6): gm
  modified_base (7)..(7): 2'-deoxy-2'-fluoroguanosine
  modified_base (8)..(8): 2'-O-methyladenosine
  modified_base (9)..(9): 2'-deoxy-2'-fluoroguanosine
  modified_base (10)..(10): cm
  modified_base (11)..(11): 2'-deoxy-2'-fluorouridine
  modified_base (12)..(12): 2'-deoxy-2'-fluorouridine
  modified_base (13)..(13): cm
  modified_base (14)..(14): 2'-deoxy-2'-fluorocytidine
  modified_base (15)..(15): um
  modified_base (16)..(16): 2'-deoxy-2'-fluoroguanosine
  modified_base (17)..(17): um
  modified_base (18)..(18): 2'-deoxy-2'-fluorocytidine
  modified_base (19)..(19): um
  modified_base (20)..(20): 2'-deoxy-2'-fluoroguanosine
  modified_base (21)..(21): um
agcccggagcuuccugucugu

SEQ ID NO: 5662 - RNA, 21 nt, Artificial Sequence
  siRNA sense strand against b2GPI
  modified_base (1)..(1): 2'-deoxy-2'-fluorocytidine
  modified_base (2)..(2): cm
  misc_feature (2)..(3): 5'-phosphonothioate
  modified_base (3)..(3): 2'-deoxy-2'-fluoroguanosine
  modified_base (4)..(4): gm
  modified_base (5)..(5): 2'-deoxy-2'-fluoroadenosine
  modified_base (6)..(6): gm
  modified_base (7)..(7): 2'-deoxy-2'-fluorocytidine
  modified_base (8)..(8): um
  modified_base (9)..(9): 2'-deoxy-2'-fluorouridine
  modified_base (10)..(10): cm
  modified_base (11)..(11): 2'-deoxy-2'-fluorocytidine
  modified_base (12)..(12): 2'-deoxy-2'-fluorouridine
  modified_base (13)..(13): gm
  modified_base (14)..(14): 2'-deoxy-2'-fluorouridine
  modified_base (15)..(15): cm
  modified_base (16)..(16): 2'-deoxy-2'-fluorouridine
  modified_base (17)..(17): gm
  modified_base (18)..(18): 2'-deoxy-2'-fluorouridine
  modified_base (19)..(19): gm
  modified_base (20)..(20): 2'-deoxy-2'-fluorocytidine
  modified_base (21)..(21): um
ccggagcuuccugucugugcu

SEQ ID NO: 5663 - RNA, 21 nt, Artificial Sequence
  siRNA sense strand against b2GPI
  modified_base (1)..(1): 2'-deoxy-2'-fluorocytidine
  modified_base (2)..(2): gm
  misc_feature (2)..(3): 5'-phosphonothioate
  modified_base (3)..(3): 2'-deoxy-2'-fluoroguanosine
  modified_base (4)..(4): 2'-O-methyladenosine
  modified_base (5)..(5): 2'-deoxy-2'-fluoroguanosine
  modified_base (6)..(6): cm
  modified_base (7)..(7): 2'-deoxy-2'-fluorouridine
  modified_base (8)..(8): um
  modified_base (9)..(9): 2'-deoxy-2'-fluorocytidine
  modified_base (10)..(10): cm
  modified_base (11)..(11): 2'-deoxy-2'-fluorouridine
  modified_base (12)..(12): 2'-deoxy-2'-fluoroguanosine
  modified_base (13)..(13): um
  modified_base (14)..(14): 2'-deoxy-2'-fluorocytidine
  modified_base (15)..(15): um
  modified_base (16)..(16): 2'-deoxy-2'-fluoroguanosine
  modified_base (17)..(17): um
  modified_base (18)..(18): 2'-deoxy-2'-fluoroguanosine
  modified_base (19)..(19): cm
  modified_base (20)..(20): 2'-deoxy-2'-fluorouridine
  modified_base (21)..(21): cm
cggagcuuccugucugugcuc

SEQ ID NO: 5664 - RNA, 21 nt, Artificial Sequence
  siRNA sense strand against b2GPI
  modified_base (1)..(1): 2'-deoxy-2'-fluoroadenosine
  modified_base (2)..(2): gm
  misc_feature (2)..(3): 5'-phosphonothioate
  modified_base (3)..(3): 2'-deoxy-2'-fluorocytidine
  modified_base (4)..(4): um
  modified_base (5)..(5): 2'-deoxy-2'-fluorouridine
  modified_base (6)..(6): cm
  modified_base (7)..(7): 2'-deoxy-2'-fluorocytidine
  modified_base (8)..(8): um
  modified_base (9)..(9): 2'-deoxy-2'-fluoroguanosine
  modified_base (10)..(10): um
  modified_base (11)..(11): 2'-deoxy-2'-fluorocytidine
  modified_base (12)..(12): 2'-deoxy-2'-fluorouridine
  modified_base (13)..(13): gm
  modified_base (14)..(14): 2'-deoxy-2'-fluorouridine
  modified_base (15)..(15): gm
  modified_base (16)..(16): 2'-deoxy-2'-fluorocytidine
  modified_base (17)..(17): um
  modified_base (18)..(18): 2'-deoxy-2'-fluorocytidine
  modified_base (19)..(19): cm
  modified_base (20)..(20): 2'-deoxy-2'-fluorocytidine
  modified_base (21)..(21): 2'-O-methyladenosine
agcuuccugucugugcuccca

SEQ ID NO: 5665 - RNA, 21 nt, Artificial Sequence
  siRNA sense strand against b2GPI
  modified_base (1)..(1): 2'-deoxy-2'-fluorouridine
  modified_base (2)..(2): cm
  misc_feature (2)..(3): 5'-phosphonothioate
  modified_base (3)..(3): 2'-deoxy-2'-fluorocytidine
  modified_base (4)..(4): um
  modified_base (5)..(5): 2'-deoxy-2'-fluoroguanosine
  modified_base (6)..(6): um
  modified_base (7)..(7): 2'-deoxy-2'-fluorocytidine
  modified_base (8)..(8): um
  modified_base (9)..(9): 2'-deoxy-2'-fluoroguanosine
  modified_base (10)..(10): um
  modified_base (11)..(11): 2'-deoxy-2'-fluoroguanosine
  modified_base (12)..(12): 2'-deoxy-2'-fluorocytidine
  modified_base (13)..(13): um
  modified_base (14)..(14): 2'-deoxy-2'-fluorocytidine
  modified_base (15)..(15): cm
  modified_base (16)..(16): 2'-deoxy-2'-fluorocytidine
  modified_base (17)..(17): 2'-O-methyladenosine
  modified_base (18)..(18): 2'-deoxy-2'-fluorouridine
  modified_base (19)..(19): cm
  modified_base (20)..(20): 2'-deoxy-2'-fluoroadenosine
  modified_base (21)..(21): um
uccugucugugcucccaucau

SEQ ID NO: 5666 - RNA, 21 nt, Artificial Sequence
  siRNA sense strand against b2GPI
  modified_base (1)..(1): 2'-deoxy-2'-fluorocytidine
  modified_base (2)..(2): um
  misc_feature (2)..(3): 5'-phosphonothioate
  modified_base (3)..(3): 2'-deoxy-2'-fluoroguanosine
  modified_base (4)..(4): um
  modified_base (5)..(5): 2'-deoxy-2'-fluorocytidine
  modified_base (6)..(6): um
  modified_base (7)..(7): 2'-deoxy-2'-fluoroguanosine
  modified_base (8)..(8): um
  modified_base (9)..(9): 2'-deoxy-2'-fluoroguanosine
  modified_base (10)..(10): cm
  modified_base (11)..(11): 2'-deoxy-2'-fluorouridine
  modified_base (12)..(12): 2'-deoxy-2'-fluorocytidine
  modified_base (13)..(13): cm
  modified_base (14)..(14): 2'-deoxy-2'-fluorocytidine
  modified_base (15)..(15): 2'-O-methyladenosine
  modified_base (16)..(16): 2'-deoxy-2'-fluorouridine
  modified_base (17)..(17): cm
  modified_base (18)..(18): 2'-deoxy-2'-fluoroadenosine
  modified_base (19)..(19): um
  modified_base (20)..(20): 2'-deoxy-2'-fluorocytidine
  modified_base (21)..(21): um
cugucugugcucccaucaucu

SEQ ID NO: 5667 - RNA, 21 nt, Artificial Sequence
  siRNA sense strand against b2GPI
  modified_base (1)..(1): 2'-deoxy-2'-fluorocytidine
  modified_base (2)..(2): um
  misc_feature (2)..(3): 5'-phosphonothioate
  modified_base (3)..(3): 2'-deoxy-2'-fluorocytidine
  modified_base (4)..(4): cm
  modified_base (5)..(5): 2'-deoxy-2'-fluorocytidine
  modified_base (6)..(6): 2'-O-methyladenosine
  modified_base (7)..(7): 2'-deoxy-2'-fluorouridine
  modified_base (8)..(8): cm
  modified_base (9)..(9): 2'-deoxy-2'-fluoroadenosine
  modified_base (10)..(10): um
  modified_base (11)..(11): 2'-deoxy-2'-fluorocytidine
  modified_base (12)..(12): 2'-deoxy-2'-fluorouridine
  modified_base (13)..(13): gm
  modified_base (14)..(14): 2'-deoxy-2'-fluorocytidine
  modified_base (15)..(15): cm
  modified_base (16)..(16): 2'-deoxy-2'-fluorocytidine
  modified_base (17)..(17): um
  modified_base (18)..(18): 2'-deoxy-2'-fluorocytidine
  modified_base (19)..(19): cm
  modified_base (20)..(20): 2'-deoxy-2'-fluoroadenosine
  modified_base (21)..(21): cm
cucccaucaucugcccuccac

SEQ ID NO: 5668 - RNA, 21 nt, Artificial Sequence
  siRNA sense strand against b2GPI
  modified_base (1)..(1): 2'-deoxy-2'-fluorocytidine
  modified_base (2)..(2): cm
  misc_feature (2)..(3): 5'-phosphonothioate
  modified_base (3)..(3): 2'-deoxy-2'-fluoroadenosine
  modified_base (4)..(4): um
  modified_base (5)..(5): 2'-deoxy-2'-fluorocytidine
  modified_base (6)..(6): 2'-O-methyladenosine
  modified_base (7)..(7): 2'-deoxy-2'-fluorouridine
  modified_base (8)..(8): cm
  modified_base (9)..(9): 2'-deoxy-2'-fluorouridine
  modified_base (10)..(10): gm
  modified_base (11)..(11): 2'-deoxy-2'-fluorocytidine
  modified_base (12)..(12): 2'-deoxy-2'-fluorocytidine
  modified_base (13)..(13): cm
  modified_base (14)..(14): 2'-deoxy-2'-fluorouridine
  modified_base (15)..(15): cm
  modified_base (16)..(16): 2'-deoxy-2'-fluorocytidine
  modified_base (17)..(17): 2'-O-methyladenosine
  modified_base (18)..(18): 2'-deoxy-2'-fluorocytidine
  modified_base (19)..(19): cm
  modified_base (20)..(20): 2'-deoxy-2'-fluoroadenosine
  modified_base (21)..(21): um
ccaucaucugcccuccaccau

SEQ ID NO: 5669 - RNA, 21 nt, Artificial Sequence
  siRNA sense strand against b2GPI
  modified_base (1)..(1): 2'-deoxy-2'-fluorocytidine
  modified_base (2)..(2): 2'-O-methyladenosine
  misc_feature (2)..(3): 5'-phosphonothioate
  modified_base (3)..(3): 2'-deoxy-2'-fluorouridine
  modified_base (4)..(4): cm
  modified_base (5)..(5): 2'-deoxy-2'-fluoroadenosine
  modified_base (6)..(6): um
  modified_base (7)..(7): 2'-deoxy-2'-fluorocytidine
  modified_base (8)..(8): um
  modified_base (9)..(9): 2'-deoxy-2'-fluoroguanosine
  modified_base (10)..(10): cm
  modified_base (11)..(11): 2'-deoxy-2'-fluorocytidine
  modified_base (12)..(12): 2'-deoxy-2'-fluorocytidine
  modified_base (13)..(13): um
  modified_base (14)..(14): 2'-deoxy-2'-fluorocytidine
  modified_base (15)..(15): cm
  modified_base (16)..(16): 2'-deoxy-2'-fluoroadenosine
  modified_base (17)..(17): cm
  modified_base (18)..(18): 2'-deoxy-2'-fluorocytidine
  modified_base (19)..(19): 2'-O-methyladenosine
  modified_base (20)..(20): 2'-deoxy-2'-fluorouridine
  modified_base (21)..(21): cm
caucaucugcccuccaccauc

SEQ ID NO: 5670 - RNA, 21 nt, Artificial Sequence
  siRNA sense strand against b2GPI
  modified_base (1)..(1): 2'-deoxy-2'-fluoroadenosine
  modified_base (2)..(2): um
  misc_feature (2)..(3): 5'-phosphonothioate
  modified_base (3)..(3): 2'-deoxy-2'-fluorocytidine
  modified_base (4)..(4): um
  modified_base (5)..(5): 2'-deoxy-2'-fluoroguanosine
  modified_base (6)..(6): cm
  modified_base (7)..(7): 2'-deoxy-2'-fluorocytidine
  modified_base (8)..(8): cm
  modified_base (9)..(9): 2'-deoxy-2'-fluorouridine
  modified_base (10)..(10): cm
  modified_base (11)..(11): 2'-deoxy-2'-fluorocytidine
  modified_base (12)..(12): 2'-deoxy-2'-fluoroadenosine
  modified_base (13)..(13): cm
  modified_base (14)..(14): 2'-deoxy-2'-fluorocytidine
  modified_base (15)..(15): 2'-O-methyladenosine
  modified_base (16)..(16): 2'-deoxy-2'-fluorouridine
  modified_base (17)..(17): cm
  modified_base (18)..(18): 2'-deoxy-2'-fluorocytidine
  modified_base (19)..(19): 2'-O-methyladenosine
  modified_base (20)..(20): 2'-deoxy-2'-fluorouridine
  modified_base (21)..(21): 2'-O-methyladenosine
aucugcccuccaccauccaua

SEQ ID NO: 5671 - RNA, 21 nt, Artificial Sequence
  siRNA sense strand against b2GPI
  modified_base (1)..(1): 2'-deoxy-2'-fluoroguanosine
  modified_base (2)..(2): cm
  misc_feature (2)..(3): 5'-phosphonothioate
  modified_base (3)..(3): 2'-deoxy-2'-fluorocytidine
  modified_base (4)..(4): cm
  modified_base (5)..(5): 2'-deoxy-2'-fluorouridine
  modified_base (6)..(6): cm
  modified_base (7)..(7): 2'-deoxy-2'-fluorocytidine
  modified_base (8)..(8): 2'-O-methyladenosine
  modified_base (9)..(9): 2'-deoxy-2'-fluorocytidine
  modified_base (10)..(10): cm
  modified_base (11)..(11): 2'-deoxy-2'-fluoroadenosine
  modified_base (12)..(12): 2'-deoxy-2'-fluorouridine
  modified_base (13)..(13): cm
  modified_base (14)..(14): 2'-deoxy-2'-fluorocytidine
  modified_base (15)..(15): 2'-O-methyladenosine
  modified_base (16)..(16): 2'-deoxy-2'-fluorouridine
  modified_base (17)..(17): 2'-O-methyladenosine
  modified_base (18)..(18): 2'-deoxy-2'-fluorocytidine
  modified_base (19)..(19): cm
  modified_base (20)..(20): 2'-deoxy-2'-fluorouridine
  modified_base (21)..(21): 2'-O-methyladenosine
gcccuccaccauccauaccua

SEQ ID NO: 5672 - RNA, 21 nt, Artificial Sequence
  siRNA sense strand against b2GPI
  modified_base (1)..(1): 2'-deoxy-2'-fluorocytidine
  modified_base (2)..(2): um
  misc_feature (2)..(3): 5'-phosphonothioate
  modified_base (3)..(3): 2'-deoxy-2'-fluorocytidine
  modified_base (4)..(4): cm
  modified_base (5)..(5): 2'-deoxy-2'-fluoroadenosine
  modified_base (6)..(6): cm
  modified_base (7)..(7): 2'-deoxy-2'-fluorocytidine
  modified_base (8)..(8): 2'-O-methyladenosine
  modified_base (9)..(9): 2'-deoxy-2'-fluorouridine
  modified_base (10)..(10): cm
  modified_base (11)..(11): 2'-deoxy-2'-fluorocytidine
  modified_base (12)..(12): 2'-deoxy-2'-fluoroadenosine
  modified_base (13)..(13): um
  modified_base (14)..(14): 2'-deoxy-2'-fluoroadenosine
  modified_base (15)..(15): cm
  modified_base (16)..(16): 2'-deoxy-2'-fluorocytidine
  modified_base (17)..(17): um
  modified_base (18)..(18): 2'-deoxy-2'-fluoroadenosine
  modified_base (19)..(19): cm
  modified_base (20)..(20): 2'-deoxy-2'-fluoroguanosine
  modified_base (21)..(21): um
cuccaccauccauaccuacgu

SEQ ID NO: 5673 - RNA, 21 nt, Artificial Sequence
  siRNA sense strand against b2GPI
  modified_base (1)..(1): 2'-deoxy-2'-fluorouridine
  modified_base (2)..(2): cm
  misc_feature (2)..(3): 5'-phosphonothioate
  modified_base (3)..(3): 2'-deoxy-2'-fluorocytidine
  modified_base (4)..(4): 2'-O-methyladenosine
  modified_base (5)..(5): 2'-deoxy-2'-fluorocytidine
  modified_base (6)..(6): cm
  modified_base (7)..(7): 2'-deoxy-2'-fluoroadenosine
  modified_base (8)..(8): um
  modified_base (9)..(9): 2'-deoxy-2'-fluorocytidine
  modified_base (10)..(10): cm
  modified_base (11)..(11): 2'-deoxy-2'-fluoroadenosine
  modified_base (12)..(12): 2'-deoxy-2'-fluorouridine
  modified_base (13)..(13): 2'-O-methyladenosine
  modified_base (14)..(14): 2'-deoxy-2'-fluorocytidine
  modified_base (15)..(15): cm
  modified_base (16)..(16): 2'-deoxy-2'-fluorouridine
  modified_base (17)..(17): 2'-O-methyladenosine
  modified_base (18)..(18): 2'-deoxy-2'-fluorocytidine
  modified_base (19)..(19): gm
  modified_base (20)..(20): 2'-deoxy-2'-fluorouridine
  modified_base (21)..(21): um
uccaccauccauaccuacguu

SEQ ID NO: 5674 - RNA, 21 nt, Artificial Sequence
  siRNA sense strand against b2GPI
  modified_base (1)..(1): 2'-deoxy-2'-fluorocytidine
  modified_base (2)..(2): cm
  misc_feature (2)..(3): 5'-phosphonothioate
  modified_base (3)..(3): 2'-deoxy-2'-fluoroadenosine
  modified_base (4)..(4): cm
  modified_base (5)..(5): 2'-deoxy-2'-fluorocytidine
  modified_base (6)..(6): 2'-O-methyladenosine
  modified_base (7)..(7): 2'-deoxy-2'-fluorouridine
  modified_base (8)..(8): cm
  modified_base (9)..(9): 2'-deoxy-2'-fluorocytidine
  modified_base (10)..(10): 2'-O-methyladenosine
  modified_base (11)..(11): 2'-deoxy-2'-fluorouridine
  modified_base (12)..(12): 2'-deoxy-2'-fluoroadenosine
  modified_base (13)..(13): cm
  modified_base (14)..(14): 2'-deoxy-2'-fluorocytidine
  modified_base (15)..(15): um
  modified_base (16)..(16): 2'-deoxy-2'-fluoroadenosine
  modified_base (17)..(17): cm
  modified_base (18)..(18): 2'-deoxy-2'-fluoroguanosine
  modified_base (19)..(19): um
  modified_base (20)..(20): 2'-deoxy-2'-fluorouridine
  modified_base (21)..(21): um
ccaccauccauaccuacguuu

SEQ ID NO: 5675 - RNA, 21 nt, Artificial Sequence
  siRNA sense strand against b2GPI
  modified_base (1)..(1): 2'-deoxy-2'-fluorocytidine
  modified_base (2)..(2): 2'-O-methyladenosine
  misc_feature (2)..(3): 5'-phosphonothioate
  modified_base (3)..(3): 2'-deoxy-2'-fluorocytidine
  modified_base (4)..(4): cm
  modified_base (5)..(5): 2'-deoxy-2'-fluoroadenosine
  modified_base (6)..(6): um
  modified_base (7)..(7): 2'-deoxy-2'-fluorocytidine
  modified_base (8)..(8): cm
  modified_base (9)..(9): 2'-deoxy-2'-fluoroadenosine
  modified_base (10)..(10): um
  modified_base (11)..(11): 2'-deoxy-2'-fluoroadenosine
  modified_base (12)..(12): 2'-deoxy-2'-fluorocytidine
  modified_base (13)..(13): cm
  modified_base (14)..(14): 2'-deoxy-2'-fluorouridine
  modified_base (15)..(15): 2'-O-methyladenosine
  modified_base (16)..(16): 2'-deoxy-2'-fluorocytidine
  modified_base (17)..(17): gm
  modified_base (18)..(18): 2'-deoxy-2'-fluorouridine
  modified_base (19)..(19): um
  modified_base (20)..(20): 2'-deoxy-2'-fluorouridine
  modified_base (21)..(21): gm
caccauccauaccuacguuug

SEQ ID NO: 5676 - RNA, 21 nt, Artificial Sequence
  siRNA sense strand against b2GPI
  modified_base (1)..(1): 2'-deoxy-2'-fluoroadenosine
  modified_base (2)..(2): cm
  misc_feature (2)..(3): 5'-phosphonothioate
  modified_base (3)..(3): 2'-deoxy-2'-fluorocytidine
  modified_base (4)..(4): 2'-O-methyladenosine
  modified_base (5)..(5): 2'-deoxy-2'-fluorouridine
  modified_base (6)..(6): cm
  modified_base (7)..(7): 2'-deoxy-2'-fluorocytidine
  modified_base (8)..(8): 2'-O-methyladenosine
  modified_base (9)..(9): 2'-deoxy-2'-fluorouridine
  modified_base (10)..(10): 2'-O-methyladenosine
  modified_base (11)..(11): 2'-deoxy-2'-fluorocytidine
  modified_base (12)..(12): 2'-deoxy-2'-fluorocytidine
  modified_base (13)..(13): um
  modified_base (14)..(14): 2'-deoxy-2'-fluoroadenosine
  modified_base (15)..(15): cm
  modified_base (16)..(16): 2'-deoxy-2'-fluoroguanosine
  modified_base (17)..(17): um
  modified_base (18)..(18): 2'-deoxy-2'-fluorouridine
  modified_base (19)..(19): um
  modified_base (20)..(20): 2'-deoxy-2'-fluoroguanosine
  modified_base (21)..(21): cm
accauccauaccuacguuugc

SEQ ID NO: 5677 - RNA, 21 nt, Artificial Sequence
  siRNA sense strand against b2GPI
  modified_base (1)..(1): 2'-deoxy-2'-fluorocytidine
  modified_base (2)..(2): cm
  misc_feature (2)..(3): 5'-phosphonothioate
  modified_base (3)..(3): 2'-deoxy-2'-fluoroadenosine
  modified_base (4)..(4): um
  modified_base (5)..(5): 2'-deoxy-2'-fluorocytidine
  modified_base (6)..(6): cm
  modified_base (7)..(7): 2'-deoxy-2'-fluoroadenosine
  modified_base (8)..(8): um
  modified_base (9)..(9): 2'-deoxy-2'-fluoroadenosine
  modified_base (10)..(10): cm
  modified_base (11)..(11): 2'-deoxy-2'-fluorocytidine
  modified_base (12)..(12): 2'-deoxy-2'-fluorouridine
  modified_base (13)..(13): 2'-O-methyladenosine
  modified_base (14)..(14): 2'-deoxy-2'-fluorocytidine
  modified_base (15)..(15): gm
  modified_base (16)..(16): 2'-deoxy-2'-fluorouridine
  modified_base (17)..(17): um
  modified_base (18)..(18): 2'-deoxy-2'-fluorouridine
  modified_base (19)..(19): gm
  modified_base (20)..(20): 2'-deoxy-2'-fluorocytidine
  modified_base (21)..(21): 2'-O-methyladenosine
ccauccauaccuacguuugca

SEQ ID NO: 5678 - RNA, 21 nt, Artificial Sequence
  siRNA sense strand against b2GPI
  modified_base (1)..(1): 2'-deoxy-2'-fluorocytidine
  modified_base (2)..(2): 2'-O-methyladenosine
  misc_feature (2)..(3): 5'-phosphonothioate
  modified_base (3)..(3): 2'-deoxy-2'-fluorouridine
  modified_base (4)..(4): cm
  modified_base (5)..(5): 2'-deoxy-2'-fluorocytidine
  modified_base (6)..(6): 2'-O-methyladenosine
  modified_base (7)..(7): 2'-deoxy-2'-fluorouridine
  modified_base (8)..(8): 2'-O-methyladenosine
  modified_base (9)..(9): 2'-deoxy-2'-fluorocytidine
  modified_base (10)..(10): cm
  modified_base (11)..(11): 2'-deoxy-2'-fluorouridine
  modified_base (12)..(12): 2'-deoxy-2'-fluoroadenosine
  modified_base (13)..(13): cm
  modified_base (14)..(14): 2'-deoxy-2'-fluoroguanosine
  modified_base (15)..(15): um
  modified_base (16)..(16): 2'-deoxy-2'-fluorouridine
  modified_base (17)..(17): um
  modified_base (18)..(18): 2'-deoxy-2'-fluoroguanosine
  modified_base (19)..(19): cm
  modified_base (20)..(20): 2'-deoxy-2'-fluoroadenosine
  modified_base (21)..(21): 2'-O-methyladenosine
cauccauaccuacguuugcaa

SEQ ID NO: 5679 - RNA, 21 nt, Artificial Sequence
  siRNA sense strand against b2GPI
  modified_base (1)..(1): 2'-deoxy-2'-fluorouridine
  modified_base (2)..(2): cm
  misc_feature (2)..(3): 5'-phosphonothioate
  modified_base (3)..(3): 2'-deoxy-2'-fluorocytidine
  modified_base (4)..(4): 2'-O-methyladenosine
  modified_base (5)..(5): 2'-deoxy-2'-fluorouridine
  modified_base (6)..(6): 2'-O-methyladenosine
  modified_base (7)..(7): 2'-deoxy-2'-fluorocytidine
  modified_base (8)..(8): cm
  modified_base (9)..(9): 2'-deoxy-2'-fluorouridine
  modified_base (10)..(10): 2'-O-methyladenosine
  modified_base (11)..(11): 2'-deoxy-2'-fluorocytidine
  modified_base (12)..(12): 2'-deoxy-2'-fluoroguanosine
  modified_base (13)..(13): um
  modified_base (14)..(14): 2'-deoxy-2'-fluorouridine
  modified_base (15)..(15): um
  modified_base (16)..(16): 2'-deoxy-2'-fluoroguanosine
  modified_base (17)..(17): cm
  modified_base (18)..(18): 2'-deoxy-2'-fluoroadenosine
  modified_base (19)..(19): 2'-O-methyladenosine
  modified_base (20)..(20): 2'-deoxy-2'-fluorocytidine
  modified_base (21)..(21): 2'-O-methyladenosine
uccauaccuacguuugcaaca

SEQ ID NO: 5680 - RNA, 21 nt, Artificial Sequence
  siRNA sense strand against b2GPI
  modified_base (1)..(1): 2'-deoxy-2'-fluoroadenosine
  modified_base (2)..(2): um
  misc_feature (2)..(3): 5'-phosphonothioate
  modified_base (3)..(3): 2'-deoxy-2'-fluoroadenosine
  modified_base (4)..(4): cm
  modified_base (5)..(5): 2'-deoxy-2'-fluorocytidine
  modified_base (6)..(6): um
  modified_base (7)..(7): 2'-deoxy-2'-fluoroadenosine
  modified_base (8)..(8): cm
  modified_base (9)..(9): 2'-deoxy-2'-fluoroguanosine
  modified_base (10)..(10): um
  modified_base (11)..(11): 2'-deoxy-2'-fluorouridine
  modified_base (12)..(12): 2'-deoxy-2'-fluorouridine
  modified_base (13)..(13): gm
  modified_base (14)..(14): 2'-deoxy-2'-fluorocytidine
  modified_base (15)..(15): 2'-O-methyladenosine
  modified_base (16)..(16): 2'-deoxy-2'-fluoroadenosine
  modified_base (17)..(17): cm
  modified_base (18)..(18): 2'-deoxy-2'-fluoroadenosine
  modified_base (19)..(19): cm
  modified_base (20)..(20): 2'-deoxy-2'-fluorouridine
  modified_base (21)..(21): um
auaccuacguuugcaacacuu

SEQ ID NO: 5681 - RNA, 21 nt, Artificial Sequence
  siRNA sense strand against b2GPI
  modified_base (1)..(1): 2'-deoxy-2'-fluorouridine
  modified_base (2)..(2): 2'-O-methyladenosine
  misc_feature (2)..(3): 5'-phosphonothioate
  modified_base (3)..(3): 2'-deoxy-2'-fluorocytidine
  modified_base (4)..(4): cm
  modified_base (5)..(5): 2'-deoxy-2'-fluorouridine
  modified_base (6)..(6): 2'-O-methyladenosine
  modified_base (7)..(7): 2'-deoxy-2'-fluorocytidine
  modified_base (8)..(8): gm
  modified_base (9)..(9): 2'-deoxy-2'-fluorouridine
  modified_base (10)..(10): um
  modified_base (11)..(11): 2'-deoxy-2'-fluorouridine
  modified_base (12)..(12): 2'-deoxy-2'-fluoroguanosine
  modified_base (13)..(13): cm
  modified_base (14)..(14): 2'-deoxy-2'-fluoroadenosine
  modified_base (15)..(15): 2'-O-methyladenosine
  modified_base (16)..(16): 2'-deoxy-2'-fluorocytidine
  modified_base (17)..(17): 2'-O-methyladenosine
  modified_base (18)..(18): 2'-deoxy-2'-fluorocytidine
  modified_base (19)..(19): um
  modified_base (20)..(20): 2'-deoxy-2'-fluorouridine
  modified_base (21)..(21): cm
uaccuacguuugcaacacuuc

SEQ ID NO: 5682 - RNA, 21 nt, Artificial Sequence
  siRNA sense strand against b2GPI
  modified_base (1)..(1): 2'-deoxy-2'-fluoroadenosine
  modified_base (2)..(2): cm
  misc_feature (2)..(3): 5'-phosphonothioate
  modified_base (3)..(3): 2'-deoxy-2'-fluorocytidine
  modified_base (4)..(4): um
  modified_base (5)..(5): 2'-deoxy-2'-fluoroadenosine
  modified_base (6)..(6): cm
  modified_base (7)..(7): 2'-deoxy-2'-fluoroguanosine
  modified_base (8)..(8): um
  modified_base (9)..(9): 2'-deoxy-2'-fluorouridine
  modified_base (10)..(10): um
  modified_base (11)..(11): 2'-deoxy-2'-fluoroguanosine
  modified_base (12)..(12): 2'-deoxy-2'-fluorocytidine
  modified_base (13)..(13): 2'-O-methyladenosine
  modified_base (14)..(14): 2'-deoxy-2'-fluoroadenosine
  modified_base (15)..(15): cm
  modified_base (16)..(16): 2'-deoxy-2'-fluoroadenosine
  modified_base (17)..(17): cm
  modified_base (18)..(18): 2'-deoxy-2'-fluorouridine
  modified_base (19)..(19): um
  modified_base (20)..(20): 2'-deoxy-2'-fluorocytidine
  modified_base (21)..(21): gm
accuacguuugcaacacuucg

SEQ ID NO: 5683 - RNA, 21 nt, Artificial Sequence
  siRNA sense strand against b2GPI
  modified_base (1)..(1): 2'-deoxy-2'-fluorocytidine
  modified_base (2)..(2): cm
  misc_feature (2)..(3): 5'-phosphonothioate
  modified_base (3)..(3): 2'-deoxy-2'-fluorouridine
  modified_base (4)..(4): 2'-O-methyladenosine
  modified_base (5)..(5): 2'-deoxy-2'-fluorocytidine
  modified_base (6)..(6): gm
  modified_base (7)..(7): 2'-deoxy-2'-fluorouridine
  modified_base (8)..(8): um
  modified_base (9)..(9): 2'-deoxy-2'-fluorouridine
  modified_base (10)..(10): gm
  modified_base (11)..(11): 2'-deoxy-2'-fluorocytidine
  modified_base (12)..(12): 2'-deoxy-2'-fluoroadenosine
  modified_base (13)..(13): 2'-O-methyladenosine
  modified_base (14)..(14): 2'-deoxy-2'-fluorocytidine
  modified_base (15)..(15): 2'-O-methyladenosine
  modified_base (16)..(16): 2'-deoxy-2'-fluorocytidine
  modified_base (17)..(17): um
  modified_base (18)..(18): 2'-deoxy-2'-fluorouridine
  modified_base (19)..(19): cm
  modified_base (20)..(20): 2'-deoxy-2'-fluoroguanosine
  modified_base (21)..(21): um
ccuacguuugcaacacuucgu

SEQ ID NO: 5684 - RNA, 21 nt, Artificial Sequence
  siRNA sense strand against b2GPI
  modified_base (1)..(1): 2'-deoxy-2'-fluorocytidine
  modified_base (2)..(2): um
  misc_feature (2)..(3): 5'-phosphonothioate
  modified_base (3)..(3): 2'-deoxy-2'-fluoroadenosine
  modified_base (4)..(4): cm
  modified_base (5)..(5): 2'-deoxy-2'-fluoroguanosine
  modified_base (6)..(6): um
  modified_base (7)..(7): 2'-deoxy-2'-fluorouridine
  modified_base (8)..(8): um
  modified_base (9)..(9): 2'-deoxy-2'-fluoroguanosine
  modified_base (10)..(10): cm
  modified_base (11)..(11): 2'-deoxy-2'-fluoroadenosine
  modified_base (12)..(12): 2'-deoxy-2'-fluoroadenosine
  modified_base (13)..(13): cm
  modified_base (14)..(14): 2'-deoxy-2'-fluoroadenosine
  modified_base (15)..(15): cm
  modified_base (16)..(16): 2'-deoxy-2'-fluorouridine
  modified_base (17)..(17): um
  modified_base (18)..(18): 2'-deoxy-2'-fluorocytidine
  modified_base (19)..(19): gm
  modified_base (20)..(20): 2'-deoxy-2'-fluorouridine
  modified_base (21)..(21): gm
cuacguuugcaacacuucgug

SEQ ID NO: 5685 - RNA, 21 nt, Artificial Sequence
  siRNA sense strand against b2GPI
  modified_base (1)..(1): 2'-deoxy-2'-fluorouridine
  modified_base (2)..(2): 2'-O-methyladenosine
  misc_feature (2)..(3): 5'-phosphonothioate
  modified_base (3)..(3): 2'-deoxy-2'-fluorocytidine
  modified_base (4)..(4): gm
  modified_base (5)..(5): 2'-deoxy-2'-fluorouridine
  modified_base (6)..(6): um
  modified_base (7)..(7): 2'-deoxy-2'-fluorouridine
  modified_base (8)..(8): gm
  modified_base (9)..(9): 2'-deoxy-2'-fluorocytidine
  modified_base (10)..(10): 2'-O-methyladenosine
  modified_base (11)..(11): 2'-deoxy-2'-fluoroadenosine
  modified_base (12)..(12): 2'-deoxy-2'-fluorocytidine
  modified_base (13)..(13): 2'-O-methyladenosine
  modified_base (14)..(14): 2'-deoxy-2'-fluorocytidine
  modified_base (15)..(15): um
  modified_base (16)..(16): 2'-deoxy-2'-fluorouridine
  modified_base (17)..(17): cm
  modified_base (18)..(18): 2'-deoxy-2'-fluoroguanosine
  modified_base (19)..(19): um
  modified_base (20)..(20): 2'-deoxy-2'-fluoroguanosine
  modified_base (21)..(21): um
uacguuugcaacacuucgugu

SEQ ID NO: 5686 - RNA, 21 nt, Artificial Sequence
  siRNA sense strand against b2GPI
  modified_base (1)..(1): 2'-deoxy-2'-fluoroadenosine
  modified_base (2)..(2): cm
  misc_feature (2)..(3): 5'-phosphonothioate
  modified_base (3)..(3): 2'-deoxy-2'-fluoroguanosine
  modified_base (4)..(4): um
  modified_base (5)..(5): 2'-deoxy-2'-fluorouridine
  modified_base (6)..(6): um
  modified_base (7)..(7): 2'-deoxy-2'-fluoroguanosine
  modified_base (8)..(8): cm
  modified_base (9)..(9): 2'-deoxy-2'-fluoroadenosine
  modified_base (10)..(10): 2'-O-methyladenosine
  modified_base (11)..(11): 2'-deoxy-2'-fluorocytidine
  modified_base (12)..(12): 2'-deoxy-2'-fluoroadenosine
  modified_base (13)..(13): cm
  modified_base (14)..(14): 2'-deoxy-2'-fluorouridine
  modified_base (15)..(15): um
  modified_base (16)..(16): 2'-deoxy-2'-fluorocytidine
  modified_base (17)..(17): gm
  modified_base (18)..(18): 2'-deoxy-2'-fluorouridine
  modified_base (19)..(19): gm
  modified_base (20)..(20): 2'-deoxy-2'-fluorouridine
  modified_base (21)..(21): um
acguuugcaacacuucguguu

SEQ ID NO: 5687 - RNA, 21 nt, Artificial Sequence
  siRNA sense strand against b2GPI
  modified_base (1)..(1): 2'-deoxy-2'-fluorocytidine
  modified_base (2)..(2): gm
  misc_feature (2)..(3): 5'-phosphonothioate
  modified_base (3)..(3): 2'-deoxy-2'-fluorouridine
  modified_base (4)..(4): um
  modified_base (5)..(5): 2'-deoxy-2'-fluorouridine
  modified_base (6)..(6): gm
  modified_base (7)..(7): 2'-deoxy-2'-fluorocytidine
  modified_base (8)..(8): 2'-O-methyladenosine
  modified_base (9)..(9): 2'-deoxy-2'-fluoroadenosine
  modified_base (10)..(10): cm
  modified_base (11)..(11): 2'-deoxy-2'-fluoroadenosine
  modified_base (12)..(12): 2'-deoxy-2'-fluorocytidine
  modified_base (13)..(13): um
  modified_base (14)..(14): 2'-deoxy-2'-fluorouridine
  modified_base (15)..(15): cm
  modified_base (16)..(16): 2'-deoxy-2'-fluoroguanosine
  modified_base (17)..(17): um
  modified_base (18)..(18): 2'-deoxy-2'-fluoroguanosine
  modified_base (19)..(19): um
  modified_base (20)..(20): 2'-deoxy-2'-fluorouridine
  modified_base (21)..(21): um
cguuugcaacacuucguguuu

SEQ ID NO: 5688 - RNA, 21 nt, Artificial Sequence
  siRNA sense strand against b2GPI
  modified_base (1)..(1): 2'-deoxy-2'-fluoroguanosine
  modified_base (2)..(2): um
  misc_feature (2)..(3): 5'-phosphonothioate
  modified_base (3)..(3): 2'-deoxy-2'-fluorouridine
  modified_base (4)..(4): um
  modified_base (5)..(5): 2'-deoxy-2'-fluoroguanosine
  modified_base (6)..(6): cm
  modified_base (7)..(7): 2'-deoxy-2'-fluoroadenosine
  modified_base (8)..(8): 2'-O-methyladenosine
  modified_base (9)..(9): 2'-deoxy-2'-fluorocytidine
  modified_base (10)..(10): 2'-O-methyladenosine
  modified_base (11)..(11): 2'-deoxy-2'-fluorocytidine
  modified_base (12)..(12): 2'-deoxy-2'-fluorouridine
  modified_base (13)..(13): um
  modified_base (14)..(14): 2'-deoxy-2'-fluorocytidine
  modified_base (15)..(15): gm
  modified_base (16)..(16): 2'-deoxy-2'-fluorouridine
  modified_base (17)..(17): gm
  modified_base (18)..(18): 2'-deoxy-2'-fluorouridine
  modified_base (19)..(19): um
  modified_base (20)..(20): 2'-deoxy-2'-fluorouridine
  modified_base (21)..(21): 2'-O-methyladenosine
guuugcaacacuucguguuua

SEQ ID NO: 5689 - RNA, 21 nt, Artificial Sequence
  siRNA sense strand against b2GPI
  modified_base (1)..(1): 2'-deoxy-2'-fluorouridine
  modified_base (2)..(2): um
  misc_feature (2)..(3): 5'-phosphonothioate
  modified_base (3)..(3): 2'-deoxy-2'-fluorouridine
  modified_base (4)..(4): gm
  modified_base (5)..(5): 2'-deoxy-2'-fluorocytidine
  modified_base (6)..(6): 2'-O-methyladenosine
  modified_base (7)..(7): 2'-deoxy-2'-fluoroadenosine
  modified_base (8)..(8): cm
  modified_base (9)..(9): 2'-deoxy-2'-fluoroadenosine
  modified_base (10)..(10): cm
  modified_base (11)..(11): 2'-deoxy-2'-fluorouridine
  modified_base (12)..(12): 2'-deoxy-2'-fluorouridine
  modified_base (13)..(13): cm
  modified_base (14)..(14): 2'-deoxy-2'-fluoroguanosine
  modified_base (15)..(15): um
  modified_base (16)..(16): 2'-deoxy-2'-fluoroguanosine
  modified_base (17)..(17): um
  modified_base (18)..(18): 2'-deoxy-2'-fluorouridine
  modified_base (19)..(19): um
  modified_base (20)..(20): 2'-deoxy-2'-fluoroadenosine
  modified_base (21)..(21): um
uuugcaacacuucguguuuau

SEQ ID NO: 5690 - RNA, 21 nt, Artificial Sequence
  siRNA sense strand against b2GPI
  modified_base (1)..(1): 2'-deoxy-2'-fluorouridine
  modified_base (2)..(2): um
  misc_feature (2)..(3): 5'-phosphonothioate
  modified_base (3)..(3): 2'-deoxy-2'-fluoroguanosine
  modified_base (4)..(4): cm
  modified_base (5)..(5): 2'-deoxy-2'-fluoroadenosine
  modified_base (6)..(6): 2'-O-methyladenosine
  modified_base (7)..(7): 2'-deoxy-2'-fluorocytidine
  modified_base (8)..(8): 2'-O-methyladenosine
  modified_base (9)..(9): 2'-deoxy-2'-fluorocytidine
  modified_base (10)..(10): um
  modified_base (11)..(11): 2'-deoxy-2'-fluorouridine
  modified_base (12)..(12): 2'-deoxy-2'-fluorocytidine
  modified_base (13)..(13): gm
  modified_base (14)..(14): 2'-deoxy-2'-fluorouridine
  modified_base (15)..(15): gm
  modified_base (16)..(16): 2'-deoxy-2'-fluorouridine
  modified_base (17)..(17): um
  modified_base (18)..(18): 2'-deoxy-2'-fluorouridine
  modified_base (19)..(19): 2'-O-methyladenosine
  modified_base (20)..(20): 2'-deoxy-2'-fluorouridine
  modified_base (21)..(21): 2'-O-methyladenosine
uugcaacacuucguguuuaua

SEQ ID NO: 5691 - RNA, 21 nt, Artificial Sequence
  siRNA sense strand against b2GPI
  modified_base (1)..(1): 2'-deoxy-2'-fluorouridine
  modified_base (2)..(2): gm
  misc_feature (2)..(3): 5'-phosphonothioate
  modified_base (3)..(3): 2'-deoxy-2'-fluorocytidine
  modified_base (4)..(4): 2'-O-methyladenosine
  modified_base (5)..(5): 2'-deoxy-2'-fluoroadenosine
  modified_base (6)..(6): cm
  modified_base (7)..(7): 2'-deoxy-2'-fluoroadenosine
  modified_base (8)..(8): cm
  modified_base (9)..(9): 2'-deoxy-2'-fluorouridine
  modified_base (10)..(10): um
  modified_base (11)..(11): 2'-deoxy-2'-fluorocytidine
  modified_base (12)..(12): 2'-deoxy-2'-fluoroguanosine
  modified_base (13)..(13): um
  modified_base (14)..(14): 2'-deoxy-2'-fluoroguanosine
  modified_base (15)..(15): um
  modified_base (16)..(16): 2'-deoxy-2'-fluorouridine
  modified_base (17)..(17): um
  modified_base (18)..(18): 2'-deoxy-2'-fluoroadenosine
  modified_base (19)..(19): um
  modified_base (20)..(20): 2'-deoxy-2'-fluoroadenosine
  modified_base (21)..(21): 2'-O-methyladenosine
ugcaacacuucguguuuauaa

SEQ ID NO: 5692 - RNA, 21 nt, Artificial Sequence
  siRNA sense strand against b2GPI
  modified_base (1)..(1): 2'-deoxy-2'-fluoroguanosine
  modified_base (2)..(2): cm
  misc_feature (2)..(3): 5'-phosphonothioate
  modified_base (3)..(3): 2'-deoxy-2'-fluoroadenosine
  modified_base (4)..(4): 2'-O-methyladenosine
  modified_base (5)..(5): 2'-deoxy-2'-fluorocytidine
  modified_base (6)..(6): 2'-O-methyladenosine
  modified_base (7)..(7): 2'-deoxy-2'-fluorocytidine
  modified_base (8)..(8): um
  modified_base (9)..(9): 2'-deoxy-2'-fluorouridine
  modified_base (10)..(10): cm
  modified_base (11)..(11): 2'-deoxy-2'-fluoroguanosine
  modified_base (12)..(12): 2'-deoxy-2'-fluorouridine
  modified_base (13)..(13): gm
  modified_base (14)..(14): 2'-deoxy-2'-fluorouridine
  modified_base (15)..(15): um
  modified_base (16)..(16): 2'-deoxy-2'-fluorouridine
  modified_base (17)..(17): 2'-O-methyladenosine
  modified_base (18)..(18): 2'-deoxy-2'-fluorouridine
  modified_base (19)..(19): 2'-O-methyladenosine
  modified_base (20)..(20): 2'-deoxy-2'-fluoroadenosine
  modified_base (21)..(21): gm
gcaacacuucguguuuauaag

SEQ ID NO: 5693 - RNA, 21 nt, Artificial Sequence
  siRNA sense strand against b2GPI
  modified_base (1)..(1): 2'-deoxy-2'-fluoroadenosine
  modified_base (2)..(2): cm
  misc_feature (2)..(3): 5'-phosphonothioate
  modified_base (3)..(3): 2'-deoxy-2'-fluoroadenosine
  modified_base (4)..(4): cm
  modified_base (5)..(5): 2'-deoxy-2'-fluorouridine
  modified_base (6)..(6): um
  modified_base (7)..(7): 2'-deoxy-2'-fluorocytidine
  modified_base (8)..(8): gm
  modified_base (9)..(9): 2'-deoxy-2'-fluorouridine
  modified_base (10)..(10): gm
  modified_base (11)..(11): 2'-deoxy-2'-fluorouridine
  modified_base (12)..(12): 2'-deoxy-2'-fluorouridine
  modified_base (13)..(13): um
  modified_base (14)..(14): 2'-deoxy-2'-fluoroadenosine
  modified_base (15)..(15): um
  modified_base (16)..(16): 2'-deoxy-2'-fluoroadenosine
  modified_base (17)..(17): 2'-O-methyladenosine
  modified_base (18)..(18): 2'-deoxy-2'-fluoroguanosine
  modified_base (19)..(19): cm
  modified_base (20)..(20): 2'-deoxy-2'-fluorocytidine
  modified_base (21)..(21): 2'-O-methyladenosine
acacuucguguuuauaagcca

SEQ ID NO: 5694 - RNA, 21 nt, Artificial Sequence
  siRNA sense strand against b2GPI
  modified_base (1)..(1): 2'-deoxy-2'-fluorocytidine
  modified_base (2)..(2): 2'-O-methyladenosine
  misc_feature (2)..(3): 5'-phosphonothioate
  modified_base (3)..(3): 2'-deoxy-2'-fluorocytidine
  modified_base (4)..(4): um
  modified_base (5)..(5): 2'-deoxy-2'-fluorouridine
  modified_base (6)..(6): cm
  modified_base (7)..(7): 2'-deoxy-2'-fluoroguanosine
  modified_base (8)..(8): um
  modified_base (9)..(9): 2'-deoxy-2'-fluoroguanosine
  modified_base (10)..(10): um
  modified_base (11)..(11): 2'-deoxy-2'-fluorouridine
  modified_base (12)..(12): 2'-deoxy-2'-fluorouridine
  modified_base (13)..(13): 2'-O-methyladenosine
  modified_base (14)..(14): 2'-deoxy-2'-fluorouridine
  modified_base (15)..(15): 2'-O-methyladenosine
  modified_base (16)..(16): 2'-deoxy-2'-fluoroadenosine
  modified_base (17)..(17): gm
  modified_base (18)..(18): 2'-deoxy-2'-fluorocytidine
  modified_base (19)..(19): cm
  modified_base (20)..(20): 2'-deoxy-2'-fluoroadenosine
  modified_base (21)..(21): um
cacuucguguuuauaagccau

SEQ ID NO: 5695 - RNA, 21 nt, Artificial Sequence
  siRNA sense strand against b2GPI
  modified_base (1)..(1): 2'-deoxy-2'-fluorouridine
  modified_base (2)..(2): cm
  misc_feature (2)..(3): 5'-phosphonothioate
  modified_base (3)..(3): 2'-deoxy-2'-fluoroguanosine
  modified_base (4)..(4): um
  modified_base (5)..(5): 2'-deoxy-2'-fluoroguanosine
  modified_base (6)..(6): um
  modified_base (7)..(7): 2'-deoxy-2'-fluorouridine
  modified_base (8)..(8): um
  modified_base (9)..(9): 2'-deoxy-2'-fluoroadenosine
  modified_base (10)..(10): um
  modified_base (11)..(11): 2'-deoxy-2'-fluoroadenosine
  modified_base (12)..(12): 2'-deoxy-2'-fluoroadenosine
  modified_base (13)..(13): gm
  modified_base (14)..(14): 2'-deoxy-2'-fluorocytidine
  modified_base (15)..(15): cm
  modified_base (16)..(16): 2'-deoxy-2'-fluoroadenosine
  modified_base (17)..(17): um
  modified_base (18)..(18): 2'-deoxy-2'-fluorocytidine
  modified_base (19)..(19): 2'-O-methyladenosine
  modified_base (20)..(20): 2'-deoxy-2'-fluoroguanosine
  modified_base (21)..(21): cm
ucguguuuauaagccaucagc

SEQ ID NO: 5696 - RNA, 21 nt, Artificial Sequence
  siRNA sense strand against b2GPI
  modified_base (1)..(1): 2'-deoxy-2'-fluorocytidine
  modified_base (2)..(2): gm
  misc_feature (2)..(3): 5'-phosphonothioate
  modified_base (3)..(3): 2'-deoxy-2'-fluorouridine
  modified_base (4)..(4): gm
  modified_base (5)..(5): 2'-deoxy-2'-fluorouridine
  modified_base (6)..(6): um
  modified_base (7)..(7): 2'-deoxy-2'-fluorouridine
  modified_base (8)..(8): 2'-O-methyladenosine
  modified_base (9)..(9): 2'-deoxy-2'-fluorouridine
  modified_base (10)..(10): 2'-O-methyladenosine
  modified_base (11)..(11): 2'-deoxy-2'-fluoroadenosine
  modified_base (12)..(12): 2'-deoxy-2'-fluoroguanosine
  modified_base (13)..(13): cm
  modified_base (14)..(14): 2'-deoxy-2'-fluorocytidine
  modified_base (15)..(15): 2'-O-methyladenosine
  modified_base (16)..(16): 2'-deoxy-2'-fluorouridine
  modified_base (17)..(17): cm
  modified_base (18)..(18): 2'-deoxy-2'-fluoroadenosine
  modified_base (19)..(19): gm
  modified_base (20)..(20): 2'-deoxy-2'-fluorocytidine
  modified_base (21)..(21): um
cguguuuauaagccaucagcu

SEQ ID NO: 5697 - RNA, 21 nt, Artificial Sequence
  siRNA sense strand against b2GPI
  modified_base (1)..(1): 2'-deoxy-2'-fluoroguanosine
  modified_base (2)..(2): um
  misc_feature (2)..(3): 5'-phosphonothioate
  modified_base (3)..(3): 2'-deoxy-2'-fluoroguanosine
  modified_base (4)..(4): um
  modified_base (5)..(5): 2'-deoxy-2'-fluorouridine
  modified_base (6)..(6): um
  modified_base (7)..(7): 2'-deoxy-2'-fluoroadenosine
  modified_base (8)..(8): um
  modified_base (9)..(9): 2'-deoxy-2'-fluoroadenosine
  modified_base (10)..(10): 2'-O-methyladenosine
  modified_base (11)..(11): 2'-deoxy-2'-fluoroguanosine
  modified_base (12)..(12): 2'-deoxy-2'-fluorocytidine
  modified_base (13)..(13): cm
  modified_base (14)..(14): 2'-deoxy-2'-fluoroadenosine
  modified_base (15)..(15): um
  modified_base (16)..(16): 2'-deoxy-2'-fluorocytidine
  modified_base (17)..(17): 2'-O-methyladenosine
  modified_base (18)..(18): 2'-deoxy-2'-fluoroguanosine
  modified_base (19)..(19): cm
  modified_base (20)..(20): 2'-deoxy-2'-fluorouridine
  modified_base (21)..(21): gm
guguuuauaagccaucagcug

SEQ ID NO: 5698 - RNA, 21 nt, Artificial Sequence
  siRNA sense strand against b2GPI
  modified_base (1)..(1): 2'-deoxy-2'-fluoroadenosine
  modified_base (2)..(2): um
  misc_feature (2)..(3): 5'-phosphonothioate
  modified_base (3)..(3): 2'-deoxy-2'-fluoroadenosine
  modified_base (4)..(4): 2'-O-methyladenosine
  modified_base (5)..(5): 2'-deoxy-2'-fluoroguanosine
  modified_base (6)..(6): cm
  modified_base (7)..(7): 2'-deoxy-2'-fluorocytidine
  modified_base (8)..(8): 2'-O-methyladenosine
  modified_base (9)..(9): 2'-deoxy-2'-fluorouridine
  modified_base (10)..(10): cm
  modified_base (11)..(11): 2'-deoxy-2'-fluoroadenosine
  modified_base (12)..(12): 2'-deoxy-2'-fluoroguanosine
  modified_base (13)..(13): cm
  modified_base (14)..(14): 2'-deoxy-2'-fluorouridine
  modified_base (15)..(15): gm
  modified_base (16)..(16): 2'-deoxy-2'-fluoroguanosine
  modified_base (17)..(17): 2'-O-methyladenosine
  modified_base (18)..(18): 2'-deoxy-2'-fluoroadenosine
  modified_base (19)..(19): 2'-O-methyladenosine
  modified_base (20)..(20): 2'-deoxy-2'-fluorocytidine
  modified_base (21)..(21): 2'-O-methyladenosine
auaagccaucagcuggaaaca

SEQ ID NO: 5699 - RNA, 21 nt, Artificial Sequence
  siRNA sense strand against b2GPI
  modified_base (1)..(1): 2'-deoxy-2'-fluorouridine
  modified_base (2)..(2): 2'-O-methyladenosine
  misc_feature (2)..(3): 5'-phosphonothioate
  modified_base (3)..(3): 2'-deoxy-2'-fluoroadenosine
  modified_base (4)..(4): gm
  modified_base (5)..(5): 2'-deoxy-2'-fluorocytidine
  modified_base (6)..(6): cm
  modified_base (7)..(7): 2'-deoxy-2'-fluoroadenosine
  modified_base (8)..(8): um
  modified_base (9)..(9): 2'-deoxy-2'-fluorocytidine
  modified_base (10)..(10): 2'-O-methyladenosine
  modified_base (11)..(11): 2'-deoxy-2'-fluoroguanosine
  modified_base (12)..(12): 2'-deoxy-2'-fluorocytidine
  modified_base (13)..(13): um
  modified_base (14)..(14): 2'-deoxy-2'-fluoroguanosine
  modified_base (15)..(15): gm
  modified_base (16)..(16): 2'-deoxy-2'-fluoroadenosine
  modified_base (17)..(17): 2'-O-methyladenosine
  modified_base (18)..(18): 2'-deoxy-2'-fluoroadenosine
  modified_base (19)..(19): cm
  modified_base (20)..(20): 2'-deoxy-2'-fluoroadenosine
  modified_base (21)..(21): 2'-O-methyladenosine
uaagccaucagcuggaaacaa

SEQ ID NO: 5700 - RNA, 21 nt, Artificial Sequence
  siRNA sense strand against b2GPI
  modified_base (1)..(1): 2'-deoxy-2'-fluoroadenosine
  modified_base (2)..(2): 2'-O-methyladenosine
  misc_feature (2)..(3): 5'-phosphonothioate
  modified_base (3)..(3): 2'-deoxy-2'-fluoroguanosine
  modified_base (4)..(4): cm
  modified_base (5)..(5): 2'-deoxy-2'-fluorocytidine
  modified_base (6)..(6): 2'-O-methyladenosine
  modified_base (7)..(7): 2'-deoxy-2'-fluorouridine
  modified_base (8)..(8): cm
  modified_base (9)..(9): 2'-deoxy-2'-fluoroadenosine
  modified_base (10)..(10): gm
  modified_base (11)..(11): 2'-deoxy-2'-fluorocytidine
  modified_base (12)..(12): 2'-deoxy-2'-fluorouridine
  modified_base (13)..(13): gm
  modified_base (14)..(14): 2'-deoxy-2'-fluoroguanosine
  modified_base (15)..(15): 2'-O-methyladenosine
  modified_base (16)..(16): 2'-deoxy-2'-fluoroadenosine
  modified_base (17)..(17): 2'-O-methyladenosine
  modified_base (18)..(18): 2'-deoxy-2'-fluorocytidine
  modified_base (19)..(19): 2'-O-methyladenosine
  modified_base (20)..(20): 2'-deoxy-2'-fluoroadenosine
  modified_base (21)..(21): um
aagccaucagcuggaaacaau

SEQ ID NO: 5701 - RNA, 21 nt, Artificial Sequence
  siRNA sense strand against b2GPI
  modified_base (1)..(1): 2'-deoxy-2'-fluoroadenosine
  modified_base (2)..(2): gm
  misc_feature (2)..(3): 5'-phosphonothioate
  modified_base (3)..(3): 2'-deoxy-2'-fluorocytidine
  modified_base (4)..(4): cm
  modified_base (5)..(5): 2'-deoxy-2'-fluoroadenosine
  modified_base (6)..(6): um
  modified_base (7)..(7): 2'-deoxy-2'-fluorocytidine
  modified_base (8)..(8): 2'-O-methyladenosine
  modified_base (9)..(9): 2'-deoxy-2'-fluoroguanosine
  modified_base (10)..(10): cm
  modified_base (11)..(11): 2'-deoxy-2'-fluorouridine
  modified_base (12)..(12): 2'-deoxy-2'-fluoroguanosine
  modified_base (13)..(13): gm
  modified_base (14)..(14): 2'-deoxy-2'-fluoroadenosine
  modified_base (15)..(15): 2'-O-methyladenosine
  modified_base (16)..(16): 2'-deoxy-2'-fluoroadenosine
  modified_base (17)..(17): cm
  modified_base (18)..(18): 2'-deoxy-2'-fluoroadenosine
  modified_base (19)..(19): 2'-O-methyladenosine
  modified_base (20)..(20): 2'-deoxy-2'-fluorouridine
  modified_base (21)..(21): um
agccaucagcuggaaacaauu

SEQ ID NO: 5702 - RNA, 21 nt, Artificial Sequence
  siRNA sense strand against b2GPI
  modified_base (1)..(1): 2'-deoxy-2'-fluoroguanosine
  modified_base (2)..(2): cm
  misc_feature (2)..(3): 5'-phosphonothioate
  modified_base (3)..(3): 2'-deoxy-2'-fluorocytidine
  modified_base (4)..(4): 2'-O-methyladenosine
  modified_base (5)..(5): 2'-deoxy-2'-fluorouridine
  modified_base (6)..(6): cm
  modified_base (7)..(7): 2'-deoxy-2'-fluoroadenosine
  modified_base (8)..(8): gm
  modified_base (9)..(9): 2'-deoxy-2'-fluorocytidine
  modified_base (10)..(10): um
  modified_base (11)..(11): 2'-deoxy-2'-fluoroguanosine
  modified_base (12)..(12): 2'-deoxy-2'-fluoroguanosine
  modified_base (13)..(13): 2'-O-methyladenosine
  modified_base (14)..(14): 2'-deoxy-2'-fluoroadenosine
  modified_base (15)..(15): 2'-O-methyladenosine
  modified_base (16)..(16): 2'-deoxy-2'-fluorocytidine
  modified_base (17)..(17): 2'-O-methyladenosine
  modified_base (18)..(18): 2'-deoxy-2'-fluoroadenosine
  modified_base (19)..(19): um
  modified_base (20)..(20): 2'-deoxy-2'-fluorouridine
  modified_base (21)..(21): cm
gccaucagcuggaaacaauuc

SEQ ID NO: 5703 - RNA, 21 nt, Artificial Sequence
  siRNA sense strand against b2GPI
  modified_base (1)..(1): 2'-deoxy-2'-fluorouridine
  modified_base (2)..(2): cm
  misc_feature (2)..(3): 5'-phosphonothioate
  modified_base (3)..(3): 2'-deoxy-2'-fluoroadenosine
  modified_base (4)..(4): gm
  modified_base (5)..(5): 2'-deoxy-2'-fluorocytidine
  modified_base (6)..(6): um
  modified_base (7)..(7): 2'-deoxy-2'-fluoroguanosine
  modified_base (8)..(8): gm
  modified_base (9)..(9): 2'-deoxy-2'-fluoroadenosine
  modified_base (10)..(10): 2'-O-methyladenosine
  modified_base (11)..(11): 2'-deoxy-2'-fluoroadenosine
  modified_base (12)..(12): 2'-deoxy-2'-fluorocytidine
  modified_base (13)..(13): 2'-O-methyladenosine
  modified_base (14)..(14): 2'-deoxy-2'-fluoroadenosine
  modified_base (15)..(15): um
  modified_base (16)..(16): 2'-deoxy-2'-fluorouridine
  modified_base (17)..(17): cm
  modified_base (18)..(18): 2'-deoxy-2'-fluorocytidine
  modified_base (19)..(19): cm
  modified_base (20)..(20): 2'-deoxy-2'-fluorouridine
  modified_base (21)..(21): cm
ucagcuggaaacaauucccuc

SEQ ID NO: 5704 - RNA, 21 nt, Artificial Sequence
  siRNA sense strand against b2GPI
  modified_base (1)..(1): 2'-deoxy-2'-fluorocytidine
  modified_base (2)..(2): 2'-O-methyladenosine
  misc_feature (2)..(3): 5'-phosphonothioate
  modified_base (3)..(3): 2'-deoxy-2'-fluoroguanosine
  modified_base (4)..(4): cm
  modified_base (5)..(5): 2'-deoxy-2'-fluorouridine
  modified_base (6)..(6): gm
  modified_base (7)..(7): 2'-deoxy-2'-fluoroguanosine
  modified_base (8)..(8): 2'-O-methyladenosine
  modified_base (9)..(9): 2'-deoxy-2'-fluoroadenosine
  modified_base (10)..(10): 2'-O-methyladenosine
  modified_base (11)..(11): 2'-deoxy-2'-fluorocytidine
  modified_base (12)..(12): 2'-deoxy-2'-fluoroadenosine
  modified_base (13)..(13): 2'-O-methyladenosine
  modified_base (14)..(14): 2'-deoxy-2'-fluorouridine
  modified_base (15)..(15): um
  modified_base (16)..(16): 2'-deoxy-2'-fluorocytidine
  modified_base (17)..(17): cm
  modified_base (18)..(18): 2'-deoxy-2'-fluorocytidine
  modified_base (19)..(19): um
  modified_base (20)..(20): 2'-deoxy-2'-fluorocytidine
  modified_base (21)..(21): um
cagcuggaaacaauucccucu

SEQ ID NO: 5705 - RNA, 21 nt, Artificial Sequence
  siRNA sense strand against b2GPI
  modified_base (1)..(1): 2'-deoxy-2'-fluorocytidine
  modified_base (2)..(2): um
  misc_feature (2)..(3): 5'-phosphonothioate
  modified_base (3)..(3): 2'-deoxy-2'-fluoroguanosine
  modified_base (4)..(4): gm
  modified_base (5)..(5): 2'-deoxy-2'-fluoroadenosine
  modified_base (6)..(6): 2'-O-methyladenosine
  modified_base (7)..(7): 2'-deoxy-2'-fluoroadenosine
  modified_base (8)..(8): cm
  modified_base (9)..(9): 2'-deoxy-2'-fluoroadenosine
  modified_base (10)..(10): 2'-O-methyladenosine
  modified_base (11)..(11): 2'-deoxy-2'-fluorouridine
  modified_base (12)..(12): 2'-deoxy-2'-fluorouridine
  modified_base (13)..(13): cm
  modified_base (14)..(14): 2'-deoxy-2'-fluorocytidine
  modified_base (15)..(15): cm
  modified_base (16)..(16): 2'-deoxy-2'-fluorouridine
  modified_base (17)..(17): cm
  modified_base (18)..(18): 2'-deoxy-2'-fluorouridine
  modified_base (19)..(19): 2'-O-methyladenosine
  modified_base (20)..(20): 2'-deoxy-2'-fluorouridine
  modified_base (21)..(21): cm
cuggaaacaauucccucuauc

SEQ ID NO: 5706 - RNA, 21 nt, Artificial Sequence
  siRNA sense strand against b2GPI
  modified_base (1)..(1): 2'-deoxy-2'-fluoroadenosine
  modified_base (2)..(2): 2'-O-methyladenosine
  misc_feature (2)..(3): 5'-phosphonothioate
  modified_base (3)..(3): 2'-deoxy-2'-fluoroadenosine
  modified_base (4)..(4): cm
  modified_base (5)..(5): 2'-deoxy-2'-fluoroadenosine
  modified_base (6)..(6): 2'-O-methyladenosine
  modified_base (7)..(7): 2'-deoxy-2'-fluorouridine
  modified_base (8)..(8): um
  modified_base (9)..(9): 2'-deoxy-2'-fluorocytidine
  modified_base (10)..(10): cm
  modified_base (11)..(11): 2'-deoxy-2'-fluorocytidine
  modified_base (12)..(12): 2'-deoxy-2'-fluorouridine
  modified_base (13)..(13): cm
  modified_base (14)..(14): 2'-deoxy-2'-fluorouridine
  modified_base (15)..(15): 2'-O-methyladenosine
  modified_base (16)..(16): 2'-deoxy-2'-fluorouridine
  modified_base (17)..(17): cm
  modified_base (18)..(18): 2'-deoxy-2'-fluoroguanosine
  modified_base (19)..(19): gm
  modified_base (20)..(20): 2'-deoxy-2'-fluoroguanosine
  modified_base (21)..(21): 2'-O-methyladenosine
aaacaauucccucuaucggga

SEQ ID NO: 5707 - RNA, 21 nt, Artificial Sequence
  siRNA sense strand against b2GPI
  modified_base (1)..(1): 2'-deoxy-2'-fluorouridine
  modified_base (2)..(2): cm
  misc_feature (2)..(3): 5'-phosphonothioate
  modified_base (3)..(3): 2'-deoxy-2'-fluorocytidine
  modified_base (4)..(4): cm
  modified_base (5)..(5): 2'-deoxy-2'-fluorouridine
  modified_base (6)..(6): cm
  modified_base (7)..(7): 2'-deoxy-2'-fluorouridine
  modified_base (8)..(8): 2'-O-methyladenosine
  modified_base (9)..(9): 2'-deoxy-2'-fluorouridine
  modified_base (10)..(10): cm
  modified_base (11)..(11): 2'-deoxy-2'-fluoroguanosine
  modified_base (12)..(12): 2'-deoxy-2'-fluoroguanosine
  modified_base (13)..(13): gm
  modified_base (14)..(14): 2'-deoxy-2'-fluoroadenosine
  modified_base (15)..(15): cm
  modified_base (16)..(16): 2'-deoxy-2'-fluoroadenosine
  modified_base (17)..(17): cm
  modified_base (18)..(18): 2'-deoxy-2'-fluoroadenosine
  modified_base (19)..(19): gm
  modified_base (20)..(20): 2'-deoxy-2'-fluorocytidine
  modified_base (21)..(21): 2'-O-methyladenosine
ucccucuaucgggacacagca

SEQ ID NO: 5708 - RNA, 21 nt, Artificial Sequence
  siRNA sense strand against b2GPI
  modified_base (1)..(1): 2'-deoxy-2'-fluorocytidine
  modified_base (2)..(2): um
  misc_feature (2)..(3): 5'-phosphonothioate
  modified_base (3)..(3): 2'-deoxy-2'-fluorocytidine
  modified_base (4)..(4): um
  modified_base (5)..(5): 2'-deoxy-2'-fluoroadenosine
  modified_base (6)..(6): um
  modified_base (7)..(7): 2'-deoxy-2'-fluorocytidine
  modified_base (8)..(8): gm
  modified_base (9)..(9): 2'-deoxy-2'-fluoroguanosine
  modified_base (10)..(10): gm
  modified_base (11)..(11): 2'-deoxy-2'-fluoroadenosine
  modified_base (12)..(12): 2'-deoxy-2'-fluorocytidine
  modified_base (13)..(13): 2'-O-methyladenosine
  modified_base (14)..(14): 2'-deoxy-2'-fluorocytidine
  modified_base (15)..(15): 2'-O-methyladenosine
  modified_base (16)..(16): 2'-deoxy-2'-fluoroguanosine
  modified_base (17)..(17): cm
  modified_base (18)..(18): 2'-deoxy-2'-fluoroadenosine
  modified_base (19)..(19): gm
  modified_base (20)..(20): 2'-deoxy-2'-fluorouridine
  modified_base (21)..(21): um
cucuaucgggacacagcaguu

SEQ ID NO: 5709 - RNA, 21 nt, Artificial Sequence
  siRNA sense strand against b2GPI
  modified_base (1)..(1): 2'-deoxy-2'-fluorouridine
  modified_base (2)..(2): cm
  misc_feature (2)..(3): 5'-phosphonothioate
  modified_base (3)..(3): 2'-deoxy-2'-fluorouridine
  modified_base (4)..(4): 2'-O-methyladenosine
  modified_base (5)..(5): 2'-deoxy-2'-fluorouridine
  modified_base (6)..(6): cm
  modified_base (7)..(7): 2'-deoxy-2'-fluoroguanosine
  modified_base (8)..(8): gm
  modified_base (9)..(9): 2'-deoxy-2'-fluoroguanosine
  modified_base (10)..(10): 2'-O-methyladenosine
  modified_base (11)..(11): 2'-deoxy-2'-fluorocytidine
  modified_base (12)..(12): 2'-deoxy-2'-fluoroadenosine
  modified_base (13)..(13): cm
  modified_base (14)..(14): 2'-deoxy-2'-fluoroadenosine
  modified_base (15)..(15): gm
  modified_base (16)..(16): 2'-deoxy-2'-fluorocytidine
  modified_base (17)..(17): 2'-O-methyladenosine
  modified_base (18)..(18): 2'-deoxy-2'-fluoroguanosine
  modified_base (19)..(19): um
  modified_base (20)..(20): 2'-deoxy-2'-fluorouridine
  modified_base (21)..(21): um
ucuaucgggacacagcaguuu

SEQ ID NO: 5710 - RNA, 21 nt, Artificial Sequence
  siRNA sense strand against b2GPI
  modified_base (1)..(1): 2'-deoxy-2'-fluorocytidine
  modified_base (2)..(2): um
  misc_feature (2)..(3): 5'-phosphonothioate
  modified_base (3)..(3): 2'-deoxy-2'-fluoroadenosine
  modified_base (4)..(4): um
  modified_base (5)..(5): 2'-deoxy-2'-fluorocytidine
  modified_base (6)..(6): gm
  modified_base (7)..(7): 2'-deoxy-2'-fluoroguanosine
  modified_base (8)..(8): gm
  modified_base (9)..(9): 2'-deoxy-2'-fluoroadenosine
  modified_base (10)..(10): cm
  modified_base (11)..(11): 2'-deoxy-2'-fluoroadenosine
  modified_base (12)..(12): 2'-deoxy-2'-fluorocytidine
  modified_base (13)..(13): 2'-O-methyladenosine
  modified_base (14)..(14): 2'-deoxy-2'-fluoroguanosine
  modified_base (15)..(15): cm
  modified_base (16)..(16): 2'-deoxy-2'-fluoroadenosine
  modified_base (17)..(17): gm
  modified_base (18)..(18): 2'-deoxy-2'-fluorouridine
  modified_base (19)..(19): um
  modified_base (20)..(20): 2'-deoxy-2'-fluorouridine
  modified_base (21)..(21): um
cuaucgggacacagcaguuuu

SEQ ID NO: 5711 - RNA, 21 nt, Artificial Sequence
  siRNA sense strand against b2GPI
  modified_base (1)..(1): 2'-deoxy-2'-fluorouridine
  modified_base (2)..(2): 2'-O-methyladenosine
  misc_feature (2)..(3): 5'-phosphonothioate
  modified_base (3)..(3): 2'-deoxy-2'-fluorouridine
  modified_base (4)..(4): cm
  modified_base (5)..(5): 2'-deoxy-2'-fluoroguanosine
  modified_base (6)..(6): gm
  modified_base (7)..(7): 2'-deoxy-2'-fluoroguanosine
  modified_base (8)..(8): 2'-O-methyladenosine
  modified_base (9)..(9): 2'-deoxy-2'-fluorocytidine
  modified_base (10)..(10): 2'-O-methyladenosine
  modified_base (11)..(11): 2'-deoxy-2'-fluorocytidine
  modified_base (12)..(12): 2'-deoxy-2'-fluoroadenosine
  modified_base (13)..(13): gm
  modified_base (14)..(14): 2'-deoxy-2'-fluorocytidine
  modified_base (15)..(15): 2'-O-methyladenosine
  modified_base (16)..(16): 2'-deoxy-2'-fluoroguanosine
  modified_base (17)..(17): um
  modified_base (18)..(18): 2'-deoxy-2'-fluorouridine
  modified_base (19)..(19): um
  modified_base (20)..(20): 2'-deoxy-2'-fluorouridine
  modified_base (21)..(21): um
uaucgggacacagcaguuuuu

SEQ ID NO: 5712 - RNA, 21 nt, Artificial Sequence
  siRNA sense strand against b2GPI
  modified_base (1)..(1): 2'-deoxy-2'-fluorouridine
  modified_base (2)..(2): cm
  misc_feature (2)..(3): 5'-phosphonothioate
  modified_base (3)..(3): 2'-deoxy-2'-fluoroguanosine
  modified_base (4)..(4): gm
  modified_base (5)..(5): 2'-deoxy-2'-fluoroguanosine
  modified_base (6)..(6): 2'-O-methyladenosine
  modified_base (7)..(7): 2'-deoxy-2'-fluorocytidine
  modified_base (8)..(8): 2'-O-methyladenosine
  modified_base (9)..(9): 2'-deoxy-2'-fluorocytidine
  modified_base (10)..(10): 2'-O-methyladenosine
  modified_base (11)..(11): 2'-deoxy-2'-fluoroguanosine
  modified_base (12)..(12): 2'-deoxy-2'-fluorocytidine
  modified_base (13)..(13): 2'-O-methyladenosine
  modified_base (14)..(14): 2'-deoxy-2'-fluoroguanosine
  modified_base (15)..(15): um
  modified_base (16)..(16): 2'-deoxy-2'-fluorouridine
  modified_base (17)..(17): um
  modified_base (18)..(18): 2'-deoxy-2'-fluorouridine
  modified_base (19)..(19): um
  modified_base (20)..(20): 2'-deoxy-2'-fluoroguanosine
  modified_base (21)..(21): 2'-O-methyladenosine
ucgggacacagcaguuuuuga

SEQ ID NO: 5713 - RNA, 21 nt, Artificial Sequence
  siRNA sense strand against b2GPI
  modified_base (1)..(1): 2'-deoxy-2'-fluorocytidine
  modified_base (2)..(2): gm
  misc_feature (2)..(3): 5'-phosphonothioate
  modified_base (3)..(3): 2'-deoxy-2'-fluoroguanosine
  modified_base (4)..(4): gm
  modified_base (5)..(5): 2'-deoxy-2'-fluoroadenosine
  modified_base (6)..(6): cm
  modified_base (7)..(7): 2'-deoxy-2'-fluoroadenosine
  modified_base (8)..(8): cm
  modified_base (9)..(9): 2'-deoxy-2'-fluoroadenosine
  modified_base (10)..(10): gm
  modified_base (11)..(11): 2'-deoxy-2'-fluorocytidine
  modified_base (12)..(12): 2'-deoxy-2'-fluoroadenosine
  modified_base (13)..(13): gm
  modified_base (14)..(14): 2'-deoxy-2'-fluorouridine
  modified_base (15)..(15): um
  modified_base (16)..(16): 2'-deoxy-2'-fluorouridine
  modified_base (17)..(17): um
  modified_base (18)..(18): 2'-deoxy-2'-fluorouridine
  modified_base (19)..(19): gm
  modified_base (20)..(20): 2'-deoxy-2'-fluoroadenosine
  modified_base (21)..(21): 2'-O-methyladenosine
cgggacacagcaguuuuugaa

SEQ ID NO: 5714 - RNA, 21 nt, Artificial Sequence
  siRNA sense strand against b2GPI
  modified_base (1)..(1): 2'-deoxy-2'-fluoroguanosine
  modified_base (2)..(2): gm
  misc_feature (2)..(3): 5'-phosphonothioate
  modified_base (3)..(3): 2'-deoxy-2'-fluoroguanosine
  modified_base (4)..(4): 2'-O-methyladenosine
  modified_base (5)..(5): 2'-deoxy-2'-fluorocytidine
  modified_base (6)..(6): 2'-O-methyladenosine
  modified_base (7)..(7): 2'-deoxy-2'-fluorocytidine
  modified_base (8)..(8): 2'-O-methyladenosine
  modified_base (9)..(9): 2'-deoxy-2'-fluoroguanosine
  modified_base (10)..(10): cm
  modified_base (11)..(11): 2'-deoxy-2'-fluoroadenosine
  modified_base (12)..(12): 2'-deoxy-2'-fluoroguanosine
  modified_base (13)..(13): um
  modified_base (14)..(14): 2'-deoxy-2'-fluorouridine
  modified_base (15)..(15): um
  modified_base (16)..(16): 2'-deoxy-2'-fluorouridine
  modified_base (17)..(17): um
  modified_base (18)..(18): 2'-deoxy-2'-fluoroguanosine
  modified_base (19)..(19): 2'-O-methyladenosine
  modified_base (20)..(20): 2'-deoxy-2'-fluoroadenosine
  modified_base (21)..(21): um
gggacacagcaguuuuugaau

SEQ ID NO: 5715 - RNA, 21 nt, Artificial Sequence
  siRNA sense strand against b2GPI
  modified_base (1)..(1): 2'-deoxy-2'-fluoroguanosine
  modified_base (2)..(2): 2'-O-methyladenosine
  misc_feature (2)..(3): 5'-phosphonothioate
  modified_base (3)..(3): 2'-deoxy-2'-fluorocytidine
  modified_base (4)..(4): 2'-O-methyladenosine
  modified_base (5)..(5): 2'-deoxy-2'-fluorocytidine
  modified_base (6)..(6): 2'-O-methyladenosine
  modified_base (7)..(7): 2'-deoxy-2'-fluoroguanosine
  modified_base (8)..(8): cm
  modified_base (9)..(9): 2'-deoxy-2'-fluoroadenosine
  modified_base (10)..(10): gm
  modified_base (11)..(11): 2'-deoxy-2'-fluorouridine
  modified_base (12)..(12): 2'-deoxy-2'-fluorouridine
  modified_base (13)..(13): um
  modified_base (14)..(14): 2'-deoxy-2'-fluorouridine
  modified_base (15)..(15): um
  modified_base (16)..(16): 2'-deoxy-2'-fluoroguanosine
  modified_base (17)..(17): 2'-O-methyladenosine
  modified_base (18)..(18): 2'-deoxy-2'-fluoroadenosine
  modified_base (19)..(19): um
  modified_base (20)..(20): 2'-deoxy-2'-fluoroguanosine
  modified_base (21)..(21): um
gacacagcaguuuuugaaugu

SEQ ID NO: 5716 - RNA, 21 nt, Artificial Sequence
  siRNA sense strand against b2GPI
  modified_base (1)..(1): 2'-deoxy-2'-fluoroadenosine
  modified_base (2)..(2): cm
  misc_feature (2)..(3): 5'-phosphonothioate
  modified_base (3)..(3): 2'-deoxy-2'-fluoroadenosine
  modified_base (4)..(4): cm
  modified_base (5)..(5): 2'-deoxy-2'-fluoroadenosine
  modified_base (6)..(6): gm
  modified_base (7)..(7): 2'-deoxy-2'-fluorocytidine
  modified_base (8)..(8): 2'-O-methyladenosine
  modified_base (9)..(9): 2'-deoxy-2'-fluoroguanosine
  modified_base (10)..(10): um
  modified_base (11)..(11): 2'-deoxy-2'-fluorouridine
  modified_base (12)..(12): 2'-deoxy-2'-fluorouridine
  modified_base (13)..(13): um
  modified_base (14)..(14): 2'-deoxy-2'-fluorouridine
  modified_base (15)..(15): gm
  modified_base (16)..(16): 2'-deoxy-2'-fluoroadenosine
  modified_base (17)..(17): 2'-O-methyladenosine
  modified_base (18)..(18): 2'-deoxy-2'-fluorouridine
  modified_base (19)..(19): gm
  modified_base (20)..(20): 2'-deoxy-2'-fluorouridine
  modified_base (21)..(21): um
acacagcaguuuuugaauguu

SEQ ID NO: 5717 - RNA, 21 nt, Artificial Sequence
  siRNA sense strand against b2GPI
  modified_base (1)..(1): 2'-deoxy-2'-fluorocytidine
  modified_base (2)..(2): 2'-O-methyladenosine
  misc_feature (2)..(3): 5'-phosphonothioate
  modified_base (3)..(3): 2'-deoxy-2'-fluorocytidine
  modified_base (4)..(4): 2'-O-methyladenosine
  modified_base (5)..(5): 2'-deoxy-2'-fluoroguanosine
  modified_base (6)..(6): cm
  modified_base (7)..(7): 2'-deoxy-2'-fluoroadenosine
  modified_base (8)..(8): gm
  modified_base (9)..(9): 2'-deoxy-2'-fluorouridine
  modified_base (10)..(10): um
  modified_base (11)..(11): 2'-deoxy-2'-fluorouridine
  modified_base (12)..(12): 2'-deoxy-2'-fluorouridine
  modified_base (13)..(13): um
  modified_base (14)..(14): 2'-deoxy-2'-fluoroguanosine
  modified_base (15)..(15): 2'-O-methyladenosine
  modified_base (16)..(16): 2'-deoxy-2'-fluoroadenosine
  modified_base (17)..(17): um
  modified_base (18)..(18): 2'-deoxy-2'-fluoroguanosine
  modified_base (19)..(19): um
  modified_base (20)..(20): 2'-deoxy-2'-fluorouridine
  modified_base (21)..(21): um
cacagcaguuuuugaauguuu

SEQ ID NO: 5718 - RNA, 21 nt, Artificial Sequence
  siRNA sense strand against b2GPI
  modified_base (1)..(1): 2'-deoxy-2'-fluoroadenosine
  modified_base (2)..(2): cm
  misc_feature (2)..(3): 5'-phosphonothioate
  modified_base (3)..(3): 2'-deoxy-2'-fluoroadenosine
  modified_base (4)..(4): gm
  modified_base (5)..(5): 2'-deoxy-2'-fluorocytidine
  modified_base (6)..(6): 2'-O-methyladenosine
  modified_base (7)..(7): 2'-deoxy-2'-fluoroguanosine
  modified_base (8)..(8): um
  modified_base (9)..(9): 2'-deoxy-2'-fluorouridine
  modified_base (10)..(10): um
  modified_base (11)..(11): 2'-deoxy-2'-fluorouridine
  modified_base (12)..(12): 2'-deoxy-2'-fluorouridine
  modified_base (13)..(13): gm
  modified_base (14)..(14): 2'-deoxy-2'-fluoroadenosine
  modified_base (15)..(15): 2'-O-methyladenosine
  modified_base (16)..(16): 2'-deoxy-2'-fluorouridine
  modified_base (17)..(17): gm
  modified_base (18)..(18): 2'-deoxy-2'-fluorouridine
  modified_base (19)..(19): um
  modified_base (20)..(20): 2'-deoxy-2'-fluorouridine
  modified_base (21)..(21): gm
acagcaguuuuugaauguuug

SEQ ID NO: 5719 - RNA, 21 nt, Artificial Sequence
  siRNA sense strand against b2GPI
  modified_base (1)..(1): 2'-deoxy-2'-fluorocytidine
  modified_base (2)..(2): 2'-O-methyladenosine
  misc_feature (2)..(3): 5'-phosphonothioate
  modified_base (3)..(3): 2'-deoxy-2'-fluoroguanosine
  modified_base (4)..(4): cm
  modified_base (5)..(5): 2'-deoxy-2'-fluoroadenosine
  modified_base (6)..(6): gm
  modified_base (7)..(7): 2'-deoxy-2'-fluorouridine
  modified_base (8)..(8): um
  modified_base (9)..(9): 2'-deoxy-2'-fluorouridine
  modified_base (10)..(10): um
  modified_base (11)..(11): 2'-deoxy-2'-fluorouridine
  modified_base (12)..(12): 2'-deoxy-2'-fluoroguanosine
  modified_base (13)..(13): 2'-O-methyladenosine
  modified_base (14)..(14): 2'-deoxy-2'-fluoroadenosine
  modified_base (15)..(15): um
  modified_base (16)..(16): 2'-deoxy-2'-fluoroguanosine
  modified_base (17)..(17): um
  modified_base (18)..(18): 2'-deoxy-2'-fluorouridine
  modified_base (19)..(19): um
  modified_base (20)..(20): 2'-deoxy-2'-fluoroguanosine
  modified_base (21)..(21): cm
cagcaguuuuugaauguuugc

SEQ ID NO: 5720 - RNA, 21 nt, Artificial Sequence
  siRNA sense strand against b2GPI
  modified_base (1)..(1): 2'-deoxy-2'-fluoroguanosine
  modified_base (2)..(2): cm
  misc_feature (2)..(3): 5'-phosphonothioate
  modified_base (3)..(3): 2'-deoxy-2'-fluoroadenosine
  modified_base (4)..(4): gm
  modified_base (5)..(5): 2'-deoxy-2'-fluorouridine
  modified_base (6)..(6): um
  modified_base (7)..(7): 2'-deoxy-2'-fluorouridine
  modified_base (8)..(8): um
  modified_base (9)..(9): 2'-deoxy-2'-fluorouridine
  modified_base (10)..(10): gm
  modified_base (11)..(11): 2'-deoxy-2'-fluoroadenosine
  modified_base (12)..(12): 2'-deoxy-2'-fluoroadenosine
  modified_base (13)..(13): um
  modified_base (14)..(14): 2'-deoxy-2'-fluoroguanosine
  modified_base (15)..(15): um
  modified_base (16)..(16): 2'-deoxy-2'-fluorouridine
  modified_base (17)..(17): um
  modified_base (18)..(18): 2'-deoxy-2'-fluoroguanosine
  modified_base (19)..(19): cm
  modified_base (20)..(20): 2'-deoxy-2'-fluorocytidine
  modified_base (21)..(21): 2'-O-methyladenosine
gcaguuuuugaauguuugcca

SEQ ID NO: 5721 - RNA, 21 nt, Artificial Sequence
  siRNA sense strand against b2GPI
  modified_base (1)..(1): 2'-deoxy-2'-fluorocytidine
  modified_base (2)..(2): 2'-O-methyladenosine
  misc_feature (2)..(3): 5'-phosphonothioate
  modified_base (3)..(3): 2'-deoxy-2'-fluoroguanosine
  modified_base (4)..(4): um
  modified_base (5)..(5): 2'-deoxy-2'-fluorouridine
  modified_base (6)..(6): um
  modified_base (7)..(7): 2'-deoxy-2'-fluorouridine
  modified_base (8)..(8): um
  modified_base (9)..(9): 2'-deoxy-2'-fluoroguanosine
  modified_base (10)..(10): 2'-O-methyladenosine
  modified_base (11)..(11): 2'-deoxy-2'-fluoroadenosine
  modified_base (12)..(12): 2'-deoxy-2'-fluorouridine
  modified_base (13)..(13): gm
  modified_base (14)..(14): 2'-deoxy-2'-fluorouridine
  modified_base (15)..(15): um
  modified_base (16)..(16): 2'-deoxy-2'-fluorouridine
  modified_base (17)..(17): gm
  modified_base (18)..(18): 2'-deoxy-2'-fluorocytidine
  modified_base (19)..(19): cm
  modified_base (20)..(20): 2'-deoxy-2'-fluoroadenosine
  modified_base (21)..(21): cm
caguuuuugaauguuugccac

SEQ ID NO: 5722 - RNA, 21 nt, Artificial Sequence
  siRNA sense strand against b2GPI
  modified_base (1)..(1): 2'-deoxy-2'-fluoroguanosine
  modified_base (2)..(2): um
  misc_feature (2)..(3): 5'-phosphonothioate
  modified_base (3)..(3): 2'-deoxy-2'-fluorouridine
  modified_base (4)..(4): um
  modified_base (5)..(5): 2'-deoxy-2'-fluorouridine
  modified_base (6)..(6): um
  modified_base (7)..(7): 2'-deoxy-2'-fluoroguanosine
  modified_base (8)..(8): 2'-O-methyladenosine
  modified_base (9)..(9): 2'-deoxy-2'-fluoroadenosine
  modified_base (10)..(10): um
  modified_base (11)..(11): 2'-deoxy-2'-fluoroguanosine
  modified_base (12)..(12): 2'-deoxy-2'-fluorouridine
  modified_base (13)..(13): um
  modified_base (14)..(14): 2'-deoxy-2'-fluorouridine
  modified_base (15)..(15): gm
  modified_base (16)..(16): 2'-deoxy-2'-fluorocytidine
  modified_base (17)..(17): cm
  modified_base (18)..(18): 2'-deoxy-2'-fluoroadenosine
  modified_base (19)..(19): cm
  modified_base (20)..(20): 2'-deoxy-2'-fluoroadenosine
  modified_base (21)..(21): 2'-O-methyladenosine
guuuuugaauguuugccacaa

SEQ ID NO: 5723 - RNA, 21 nt, Artificial Sequence
  siRNA sense strand against b2GPI
  modified_base (1)..(1): 2'-deoxy-2'-fluorouridine
  modified_base (2)..(2): um
  misc_feature (2)..(3): 5'-phosphonothioate
  modified_base (3)..(3): 2'-deoxy-2'-fluorouridine
  modified_base (4)..(4): um
  modified_base (5)..(5): 2'-deoxy-2'-fluoroguanosine
  modified_base (6)..(6): 2'-O-methyladenosine
  modified_base (7)..(7): 2'-deoxy-2'-fluoroadenosine
  modified_base (8)..(8): um
  modified_base (9)..(9): 2'-deoxy-2'-fluoroguanosine
  modified_base (10)..(10): um
  modified_base (11)..(11): 2'-deoxy-2'-fluorouridine
  modified_base (12)..(12): 2'-deoxy-2'-fluorouridine
  modified_base (13)..(13): gm
  modified_base (14)..(14): 2'-deoxy-2'-fluorocytidine
  modified_base (15)..(15): cm
  modified_base (16)..(16): 2'-deoxy-2'-fluoroadenosine
  modified_base (17)..(17): cm
  modified_base (18)..(18): 2'-deoxy-2'-fluoroadenosine
  modified_base (19)..(19): 2'-O-methyladenosine
  modified_base (20)..(20): 2'-deoxy-2'-fluorocytidine
  modified_base (21)..(21): 2'-O-methyladenosine
uuuugaauguuugccacaaca

SEQ ID NO: 5724 - RNA, 21 nt, Artificial Sequence
  siRNA sense strand against b2GPI
  modified_base (1)..(1): 2'-deoxy-2'-fluorouridine
  modified_base (2)..(2): um
  misc_feature (2)..(3): 5'-phosphonothioate
  modified_base (3)..(3): 2'-deoxy-2'-fluorouridine
  modified_base (4)..(4): gm
  modified_base (5)..(5): 2'-deoxy-2'-fluoroadenosine
  modified_base (6)..(6): 2'-O-methyladenosine
  modified_base (7)..(7): 2'-deoxy-2'-fluorouridine
  modified_base (8)..(8): gm
  modified_base (9)..(9): 2'-deoxy-2'-fluorouridine
  modified_base (10)..(10): um
  modified_base (11)..(11): 2'-deoxy-2'-fluorouridine
  modified_base (12)..(12): 2'-deoxy-2'-fluoroguanosine
  modified_base (13)..(13): cm
  modified_base (14)..(14): 2'-deoxy-2'-fluorocytidine
  modified_base (15)..(15): 2'-O-methyladenosine
  modified_base (16)..(16): 2'-deoxy-2'-fluorocytidine
  modified_base (17)..(17): 2'-O-methyladenosine
  modified_base (18)..(18): 2'-deoxy-2'-fluoroadenosine
  modified_base (19)..(19): cm
  modified_base (20)..(20): 2'-deoxy-2'-fluoroadenosine
  modified_base (21)..(21): um
uuugaauguuugccacaacau

SEQ ID NO: 5725 - RNA, 21 nt, Artificial Sequence
  siRNA sense strand against b2GPI
  modified_base (1)..(1): 2'-deoxy-2'-fluorouridine
  modified_base (2)..(2): um
  misc_feature (2)..(3): 5'-phosphonothioate
  modified_base (3)..(3): 2'-deoxy-2'-fluoroguanosine
  modified_base (4)..(4): 2'-O-methyladenosine
  modified_base (5)..(5): 2'-deoxy-2'-fluoroadenosine
  modified_base (6)..(6): um
  modified_base (7)..(7): 2'-deoxy-2'-fluoroguanosine
  modified_base (8)..(8): um
  modified_base (9)..(9): 2'-deoxy-2'-fluorouridine
  modified_base (10)..(10): um
  modified_base (11)..(11): 2'-deoxy-2'-fluoroguanosine
  modified_base (12)..(12): 2'-deoxy-2'-fluorocytidine
  modified_base (13)..(13): cm
  modified_base (14)..(14): 2'-deoxy-2'-fluoroadenosine
  modified_base (15)..(15): cm
  modified_base (16)..(16): 2'-deoxy-2'-fluoroadenosine
  modified_base (17)..(17): 2'-O-methyladenosine
  modified_base (18)..(18): 2'-deoxy-2'-fluorocytidine
  modified_base (19)..(19): 2'-O-methyladenosine
  modified_base (20)..(20): 2'-deoxy-2'-fluorouridine
  modified_base (21)..(21): gm
uugaauguuugccacaacaug

SEQ ID NO: 5726 - RNA, 21 nt, Artificial Sequence
  siRNA sense strand against b2GPI
  modified_base (1)..(1): 2'-deoxy-2'-fluoroadenosine
  modified_base (2)..(2): um
  misc_feature (2)..(3): 5'-phosphonothioate
  modified_base (3)..(3): 2'-deoxy-2'-fluoroguanosine
  modified_base (4)..(4): um
  modified_base (5)..(5): 2'-deoxy-2'-fluorouridine
  modified_base (6)..(6): um
  modified_base (7)..(7): 2'-deoxy-2'-fluoroguanosine
  modified_base (8)..(8): cm
  modified_base (9)..(9): 2'-deoxy-2'-fluorocytidine
  modified_base (10)..(10): 2'-O-methyladenosine
  modified_base (11)..(11): 2'-deoxy-2'-fluorocytidine
  modified_base (12)..(12): 2'-deoxy-2'-fluoroadenosine
  modified_base (13)..(13): 2'-O-methyladenosine
  modified_base (14)..(14): 2'-deoxy-2'-fluorocytidine
  modified_base (15)..(15): 2'-O-methyladenosine
  modified_base (16)..(16): 2'-deoxy-2'-fluorouridine
  modified_base (17)..(17): gm
  modified_base (18)..(18): 2'-deoxy-2'-fluorocytidine
  modified_base (19)..(19): gm
  modified_base (20)..(20): 2'-deoxy-2'-fluoroadenosine
  modified_base (21)..(21): um
auguuugccacaacaugcgau

SEQ ID NO: 5727 - RNA, 21 nt, Artificial Sequence
  siRNA sense strand against b2GPI
  modified_base (1)..(1): 2'-deoxy-2'-fluorouridine
  modified_base (2)..(2): um
  misc_feature (2)..(3): 5'-phosphonothioate
  modified_base (3)..(3): 2'-deoxy-2'-fluoroguanosine
  modified_base (4)..(4): cm
  modified_base (5)..(5): 2'-deoxy-2'-fluorocytidine
  modified_base (6)..(6): 2'-O-methyladenosine
  modified_base (7)..(7): 2'-deoxy-2'-fluorocytidine
  modified_base (8)..(8): 2'-O-methyladenosine
  modified_base (9)..(9): 2'-deoxy-2'-fluoroadenosine
  modified_base (10)..(10): cm
  modified_base (11)..(11): 2'-deoxy-2'-fluoroadenosine
  modified_base (12)..(12): 2'-deoxy-2'-fluorouridine
  modified_base (13)..(13): gm
  modified_base (14)..(14): 2'-deoxy-2'-fluorocytidine
  modified_base (15)..(15): gm
  modified_base (16)..(16): 2'-deoxy-2'-fluoroadenosine
  modified_base (17)..(17): um
  modified_base (18)..(18): 2'-deoxy-2'-fluoroguanosine
  modified_base (19)..(19): um
  modified_base (20)..(20): 2'-deoxy-2'-fluorouridine
  modified_base (21)..(21): um
uugccacaacaugcgauguuu

SEQ ID NO: 5728 - RNA, 21 nt, Artificial Sequence
  siRNA sense strand against b2GPI
  modified_base (1)..(1): 2'-deoxy-2'-fluorouridine
  modified_base (2)..(2): gm
  misc_feature (2)..(3): 5'-phosphonothioate
  modified_base (3)..(3): 2'-deoxy-2'-fluorocytidine
  modified_base (4)..(4): cm
  modified_base (5)..(5): 2'-deoxy-2'-fluoroadenosine
  modified_base (6)..(6): cm
  modified_base (7)..(7): 2'-deoxy-2'-fluoroadenosine
  modified_base (8)..(8): 2'-O-methyladenosine
  modified_base (9)..(9): 2'-deoxy-2'-fluorocytidine
  modified_base (10)..(10): 2'-O-methyladenosine
  modified_base (11)..(11): 2'-deoxy-2'-fluorouridine
  modified_base (12)..(12): 2'-deoxy-2'-fluoroguanosine
  modified_base (13)..(13): cm
  modified_base (14)..(14): 2'-deoxy-2'-fluoroguanosine
  modified_base (15)..(15): 2'-O-methyladenosine
  modified_base (16)..(16): 2'-deoxy-2'-fluorouridine
  modified_base (17)..(17): gm
  modified_base (18)..(18): 2'-deoxy-2'-fluorouridine
  modified_base (19)..(19): um
  modified_base (20)..(20): 2'-deoxy-2'-fluorouridine
  modified_base (21)..(21): gm
ugccacaacaugcgauguuug

SEQ ID NO: 5729 - RNA, 21 nt, Artificial Sequence
  siRNA sense strand against b2GPI
  modified_base (1)..(1): 2'-deoxy-2'-fluorocytidine
  modified_base (2)..(2): cm
  misc_feature (2)..(3): 5'-phosphonothioate
  modified_base (3)..(3): 2'-deoxy-2'-fluoroadenosine
  modified_base (4)..(4): cm
  modified_base (5)..(5): 2'-deoxy-2'-fluoroadenosine
  modified_base (6)..(6): 2'-O-methyladenosine
  modified_base (7)..(7): 2'-deoxy-2'-fluorocytidine
  modified_base (8)..(8): 2'-O-methyladenosine
  modified_base (9)..(9): 2'-deoxy-2'-fluorouridine
  modified_base (10)..(10): gm
  modified_base (11)..(11): 2'-deoxy-2'-fluorocytidine
  modified_base (12)..(12): 2'-deoxy-2'-fluoroguanosine
  modified_base (13)..(13): 2'-O-methyladenosine
  modified_base (14)..(14): 2'-deoxy-2'-fluorouridine
  modified_base (15)..(15): gm
  modified_base (16)..(16): 2'-deoxy-2'-fluorouridine
  modified_base (17)..(17): um
  modified_base (18)..(18): 2'-deoxy-2'-fluorouridine
  modified_base (19)..(19): gm
  modified_base (20)..(20): 2'-deoxy-2'-fluoroguanosine
  modified_base (21)..(21): 2'-O-methyladenosine
ccacaacaugcgauguuugga

SEQ ID NO: 5730 - RNA, 21 nt, Artificial Sequence
  siRNA sense strand against b2GPI
  modified_base (1)..(1): 2'-deoxy-2'-fluorocytidine
  modified_base (2)..(2): 2'-O-methyladenosine
  misc_feature (2)..(3): 5'-phosphonothioate
  modified_base (3)..(3): 2'-deoxy-2'-fluorocytidine
  modified_base (4)..(4): 2'-O-methyladenosine
  modified_base (5)..(5): 2'-deoxy-2'-fluoroadenosine
  modified_base (6)..(6): cm
  modified_base (7)..(7): 2'-deoxy-2'-fluoroadenosine
  modified_base (8)..(8): um
  modified_base (9)..(9): 2'-deoxy-2'-fluoroguanosine
  modified_base (10)..(10): cm
  modified_base (11)..(11): 2'-deoxy-2'-fluoroguanosine
  modified_base (12)..(12): 2'-deoxy-2'-fluoroadenosine
  modified_base (13)..(13): um
  modified_base (14)..(14): 2'-deoxy-2'-fluoroguanosine
  modified_base (15)..(15): um
  modified_base (16)..(16): 2'-deoxy-2'-fluorouridine
  modified_base (17)..(17): um
  modified_base (18)..(18): 2'-deoxy-2'-fluoroguanosine
  modified_base (19)..(19): gm
  modified_base (20)..(20): 2'-deoxy-2'-fluoroadenosine
  modified_base (21)..(21): 2'-O-methyladenosine
cacaacaugcgauguuuggaa

SEQ ID NO: 5731 - RNA, 21 nt, Artificial Sequence
  siRNA sense strand against b2GPI
  modified_base (1)..(1): 2'-deoxy-2'-fluorocytidine
  modified_base (2)..(2): 2'-O-methyladenosine
  misc_feature (2)..(3): 5'-phosphonothioate
  modified_base (3)..(3): 2'-deoxy-2'-fluoroadenosine
  modified_base (4)..(4): cm
  modified_base (5)..(5): 2'-deoxy-2'-fluoroadenosine
  modified_base (6)..(6): um
  modified_base (7)..(7): 2'-deoxy-2'-fluoroguanosine
  modified_base (8)..(8): cm
  modified_base (9)..(9): 2'-deoxy-2'-fluoroguanosine
  modified_base (10)..(10): 2'-O-methyladenosine
  modified_base (11)..(11): 2'-deoxy-2'-fluorouridine
  modified_base (12)..(12): 2'-deoxy-2'-fluoroguanosine
  modified_base (13)..(13): um
  modified_base (14)..(14): 2'-deoxy-2'-fluorouridine
  modified_base (15)..(15): um
  modified_base (16)..(16): 2'-deoxy-2'-fluoroguanosine
  modified_base (17)..(17): gm
  modified_base (18)..(18): 2'-deoxy-2'-fluoroadenosine
  modified_base (19)..(19): 2'-O-methyladenosine
  modified_base (20)..(20): 2'-deoxy-2'-fluoroadenosine
  modified_base (21)..(21): um
caacaugcgauguuuggaaau

SEQ ID NO: 5732 - RNA, 21 nt, Artificial Sequence
  siRNA sense strand against b2GPI
  modified_base (1)..(1): 2'-deoxy-2'-fluoroadenosine
  modified_base (2)..(2): cm
  misc_feature (2)..(3): 5'-phosphonothioate
  modified_base (3)..(3): 2'-deoxy-2'-fluoroadenosine
  modified_base (4)..(4): um
  modified_base (5)..(5): 2'-deoxy-2'-fluoroguanosine
  modified_base (6)..(6): cm
  modified_base (7)..(7): 2'-deoxy-2'-fluoroguanosine
  modified_base (8)..(8): 2'-O-methyladenosine
  modified_base (9)..(9): 2'-deoxy-2'-fluorouridine
  modified_base (10)..(10): gm
  modified_base (11)..(11): 2'-deoxy-2'-fluorouridine
  modified_base (12)..(12): 2'-deoxy-2'-fluorouridine
  modified_base (13)..(13): um
  modified_base (14)..(14): 2'-deoxy-2'-fluoroguanosine
  modified_base (15)..(15): gm
  modified_base (16)..(16): 2'-deoxy-2'-fluoroadenosine
  modified_base (17)..(17): 2'-O-methyladenosine
  modified_base (18)..(18): 2'-deoxy-2'-fluoroadenosine
  modified_base (19)..(19): um
  modified_base (20)..(20): 2'-deoxy-2'-fluoroguanosine
  modified_base (21)..(21): 2'-O-methyladenosine
acaugcgauguuuggaaauga

SEQ ID NO: 5733 - RNA, 21 nt, Artificial Sequence
  siRNA sense strand against b2GPI
  modified_base (1)..(1): 2'-deoxy-2'-fluorocytidine
  modified_base (2)..(2): 2'-O-methyladenosine
  misc_feature (2)..(3): 5'-phosphonothioate
  modified_base (3)..(3): 2'-deoxy-2'-fluorouridine
  modified_base (4)..(4): gm
  modified_base (5)..(5): 2'-deoxy-2'-fluorocytidine
  modified_base (6)..(6): gm
  modified_base (7)..(7): 2'-deoxy-2'-fluoroadenosine
  modified_base (8)..(8): um
  modified_base (9)..(9): 2'-deoxy-2'-fluoroguanosine
  modified_base (10)..(10): um
  modified_base (11)..(11): 2'-deoxy-2'-fluorouridine
  modified_base (12)..(12): 2'-deoxy-2'-fluorouridine
  modified_base (13)..(13): gm
  modified_base (14)..(14): 2'-deoxy-2'-fluoroguanosine
  modified_base (15)..(15): 2'-O-methyladenosine
  modified_base (16)..(16): 2'-deoxy-2'-fluoroadenosine
  modified_base (17)..(17): 2'-O-methyladenosine
  modified_base (18)..(18): 2'-deoxy-2'-fluorouridine
  modified_base (19)..(19): gm
  modified_base (20)..(20): 2'-deoxy-2'-fluoroadenosine
  modified_base (21)..(21): um
caugcgauguuuggaaaugau

SEQ ID NO: 5734 - RNA, 21 nt, Artificial Sequence
  siRNA sense strand against b2GPI
  modified_base (1)..(1): 2'-deoxy-2'-fluoroadenosine
  modified_base (2)..(2): um
  misc_feature (2)..(3): 5'-phosphonothioate
  modified_base (3)..(3): 2'-deoxy-2'-fluoroguanosine
  modified_base (4)..(4): cm
  modified_base (5)..(5): 2'-deoxy-2'-fluoroguanosine
  modified_base (6)..(6): 2'-O-methyladenosine
  modified_base (7)..(7): 2'-deoxy-2'-fluorouridine
  modified_base (8)..(8): gm
  modified_base (9)..(9): 2'-deoxy-2'-fluorouridine
  modified_base (10)..(10): um
  modified_base (11)..(11): 2'-deoxy-2'-fluorouridine
  modified_base (12)..(12): 2'-deoxy-2'-fluoroguanosine
  modified_base (13)..(13): gm
  modified_base (14)..(14): 2'-deoxy-2'-fluoroadenosine
  modified_base (15)..(15): 2'-O-methyladenosine
  modified_base (16)..(16): 2'-deoxy-2'-fluoroadenosine
  modified_base (17)..(17): um
  modified_base (18)..(18): 2'-deoxy-2'-fluoroguanosine
  modified_base (19)..(19): 2'-O-methyladenosine
  modified_base (20)..(20): 2'-deoxy-2'-fluorouridine
  modified_base (21)..(21): 2'-O-methyladenosine
augcgauguuuggaaaugaua

SEQ ID NO: 5735 - RNA, 21 nt, Artificial Sequence
  siRNA sense strand against b2GPI
  modified_base (1)..(1): 2'-deoxy-2'-fluorouridine
  modified_base (2)..(2): gm
  misc_feature (2)..(3): 5'-phosphonothioate
  modified_base (3)..(3): 2'-deoxy-2'-fluorocytidine
  modified_base (4)..(4): gm
  modified_base (5)..(5): 2'-deoxy-2'-fluoroadenosine
  modified_base (6)..(6): um
  modified_base (7)..(7): 2'-deoxy-2'-fluoroguanosine
  modified_base (8)..(8): um
  modified_base (9)..(9): 2'-deoxy-2'-fluorouridine
  modified_base (10)..(10): um
  modified_base (11)..(11): 2'-deoxy-2'-fluoroguanosine
  modified_base (12)..(12): 2'-deoxy-2'-fluoroguanosine
  modified_base (13)..(13): 2'-O-methyladenosine
  modified_base (14)..(14): 2'-deoxy-2'-fluoroadenosine
  modified_base (15)..(15): 2'-O-methyladenosine
  modified_base (16)..(16): 2'-deoxy-2'-fluorouridine
  modified_base (17)..(17): gm
  modified_base (18)..(18): 2'-deoxy-2'-fluoroadenosine
  modified_base (19)..(19): um
  modified_base (20)..(20): 2'-deoxy-2'-fluoroadenosine
  modified_base (21)..(21): cm
ugcgauguuuggaaaugauac

SEQ ID NO: 5736 - RNA, 21 nt, Artificial Sequence
  siRNA sense strand against b2GPI
  modified_base (1)..(1): 2'-deoxy-2'-fluoroguanosine
  modified_base (2)..(2): cm
  misc_feature (2)..(3): 5'-phosphonothioate
  modified_base (3)..(3): 2'-deoxy-2'-fluoroguanosine
  modified_base (4)..(4): 2'-O-methyladenosine
  modified_base (5)..(5): 2'-deoxy-2'-fluorouridine
  modified_base (6)..(6): gm
  modified_base (7)..(7): 2'-deoxy-2'-fluorouridine
  modified_base (8)..(8): um
  modified_base (9)..(9): 2'-deoxy-2'-fluorouridine
  modified_base (10)..(10): gm
  modified_base (11)..(11): 2'-deoxy-2'-fluoroguanosine
  modified_base (12)..(12): 2'-deoxy-2'-fluoroadenosine
  modified_base (13)..(13): 2'-O-methyladenosine
  modified_base (14)..(14): 2'-deoxy-2'-fluoroadenosine
  modified_base (15)..(15): um
  modified_base (16)..(16): 2'-deoxy-2'-fluoroguanosine
  modified_base (17)..(17): 2'-O-methyladenosine
  modified_base (18)..(18): 2'-deoxy-2'-fluorouridine
  modified_base (19)..(19): 2'-O-methyladenosine
  modified_base (20)..(20): 2'-deoxy-2'-fluorocytidine
  modified_base (21)..(21): 2'-O-methyladenosine
gcgauguuuggaaaugauaca

SEQ ID NO: 5737 - RNA, 21 nt, Artificial Sequence
  siRNA sense strand against b2GPI
  modified_base (1)..(1): 2'-deoxy-2'-fluorocytidine
  modified_base (2)..(2): gm
  misc_feature (2)..(3): 5'-phosphonothioate
  modified_base (3)..(3): 2'-deoxy-2'-fluoroadenosine
  modified_base (4)..(4): um
  modified_base (5)..(5): 2'-deoxy-2'-fluoroguanosine
  modified_base (6)..(6): um
  modified_base (7)..(7): 2'-deoxy-2'-fluorouridine
  modified_base (8)..(8): um
  modified_base (9)..(9): 2'-deoxy-2'-fluoroguanosine
  modified_base (10)..(10): gm
  modified_base (11)..(11): 2'-deoxy-2'-fluoroadenosine
  modified_base (12)..(12): 2'-deoxy-2'-fluoroadenosine
  modified_base (13)..(13): 2'-O-methyladenosine
  modified_base (14)..(14): 2'-deoxy-2'-fluorouridine
  modified_base (15)..(15): gm
  modified_base (16)..(16): 2'-deoxy-2'-fluoroadenosine
  modified_base (17)..(17): um
  modified_base (18)..(18): 2'-deoxy-2'-fluoroadenosine
  modified_base (19)..(19): cm
  modified_base (20)..(20): 2'-deoxy-2'-fluoroadenosine
  modified_base (21)..(21): 2'-O-methyladenosine
cgauguuuggaaaugauacaa

SEQ ID NO: 5738 - RNA, 21 nt, Artificial Sequence
  siRNA sense strand against b2GPI
  modified_base (1)..(1): 2'-deoxy-2'-fluoroadenosine
  modified_base (2)..(2): um
  misc_feature (2)..(3): 5'-phosphonothioate
  modified_base (3)..(3): 2'-deoxy-2'-fluoroguanosine
  modified_base (4)..(4): um
  modified_base (5)..(5): 2'-deoxy-2'-fluorouridine
  modified_base (6)..(6): um
  modified_base (7)..(7): 2'-deoxy-2'-fluoroguanosine
  modified_base (8)..(8): gm
  modified_base (9)..(9): 2'-deoxy-2'-fluoroadenosine
  modified_base (10)..(10): 2'-O-methyladenosine
  modified_base (11)..(11): 2'-deoxy-2'-fluoroadenosine
  modified_base (12)..(12): 2'-deoxy-2'-fluorouridine
  modified_base (13)..(13): gm
  modified_base (14)..(14): 2'-deoxy-2'-fluoroadenosine
  modified_base (15)..(15): um
  modified_base (16)..(16): 2'-deoxy-2'-fluoroadenosine
  modified_base (17)..(17): cm
  modified_base (18)..(18): 2'-deoxy-2'-fluoroadenosine
  modified_base (19)..(19): 2'-O-methyladenosine
  modified_base (20)..(20): 2'-deoxy-2'-fluorouridine
  modified_base (21)..(21): um
auguuuggaaaugauacaauu

SEQ ID NO: 5739 - RNA, 21 nt, Artificial Sequence
  siRNA sense strand against b2GPI
  modified_base (1)..(1): 2'-deoxy-2'-fluorouridine
  modified_base (2)..(2): gm
  misc_feature (2)..(3): 5'-phosphonothioate
  modified_base (3)..(3): 2'-deoxy-2'-fluorouridine
  modified_base (4)..(4): um
  modified_base (5)..(5): 2'-deoxy-2'-fluorouridine
  modified_base (6)..(6): gm
  modified_base (7)..(7): 2'-deoxy-2'-fluoroguanosine
  modified_base (8)..(8): 2'-O-methyladenosine
  modified_base (9)..(9): 2'-deoxy-2'-fluoroadenosine
  modified_base (10)..(10): 2'-O-methyladenosine
  modified_base (11)..(11): 2'-deoxy-2'-fluorouridine
  modified_base (12)..(12): 2'-deoxy-2'-fluoroguanosine
  modified_base (13)..(13): 2'-O-methyladenosine
  modified_base (14)..(14): 2'-deoxy-2'-fluorouridine
  modified_base (15)..(15): 2'-O-methyladenosine
  modified_base (16)..(16): 2'-deoxy-2'-fluorocytidine
  modified_base (17)..(17): 2'-O-methyladenosine
  modified_base (18)..(18): 2'-deoxy-2'-fluoroadenosine
  modified_base (19)..(19): um
  modified_base (20)..(20): 2'-deoxy-2'-fluorouridine
  modified_base (21)..(21): 2'-O-methyladenosine
uguuuggaaaugauacaauua

SEQ ID NO: 5740 - RNA, 21 nt, Artificial Sequence
  siRNA sense strand against b2GPI
  modified_base (1)..(1): 2'-deoxy-2'-fluorouridine
  modified_base (2)..(2): um
  misc_feature (2)..(3): 5'-phosphonothioate
  modified_base (3)..(3): 2'-deoxy-2'-fluoroguanosine
  modified_base (4)..(4): gm
  modified_base (5)..(5): 2'-deoxy-2'-fluoroadenosine
  modified_base (6)..(6): 2'-O-methyladenosine
  modified_base (7)..(7): 2'-deoxy-2'-fluoroadenosine
  modified_base (8)..(8): um
  modified_base (9)..(9): 2'-deoxy-2'-fluoroguanosine
  modified_base (10)..(10): 2'-O-methyladenosine
  modified_base (11)..(11): 2'-deoxy-2'-fluorouridine
  modified_base (12)..(12): 2'-deoxy-2'-fluoroadenosine
  modified_base (13)..(13): cm
  modified_base (14)..(14): 2'-deoxy-2'-fluoroadenosine
  modified_base (15)..(15): 2'-O-methyladenosine
  modified_base (16)..(16): 2'-deoxy-2'-fluorouridine
  modified_base (17)..(17): um
  modified_base (18)..(18): 2'-deoxy-2'-fluoroadenosine
  modified_base (19)..(19): cm
  modified_base (20)..(20): 2'-deoxy-2'-fluorocytidine
  modified_base (21)..(21): um
uuggaaaugauacaauuaccu

SEQ ID NO: 5741 - RNA, 21 nt, Artificial Sequence
  siRNA sense strand against b2GPI
  modified_base (1)..(1): 2'-deoxy-2'-fluoroadenosine
  modified_base (2)..(2): um
  misc_feature (2)..(3): 5'-phosphonothioate
  modified_base (3)..(3): 2'-deoxy-2'-fluoroguanosine
  modified_base (4)..(4): 2'-O-methyladenosine
  modified_base (5)..(5): 2'-deoxy-2'-fluorouridine
  modified_base (6)..(6): 2'-O-methyladenosine
  modified_base (7)..(7): 2'-deoxy-2'-fluorocytidine
  modified_base (8)..(8): 2'-O-methyladenosine
  modified_base (9)..(9): 2'-deoxy-2'-fluoroadenosine
  modified_base (10)..(10): um
  modified_base (11)..(11): 2'-deoxy-2'-fluorouridine
  modified_base (12)..(12): 2'-deoxy-2'-fluoroadenosine
  modified_base (13)..(13): cm
  modified_base (14)..(14): 2'-deoxy-2'-fluorocytidine
  modified_base (15)..(15): um
  modified_base (16)..(16): 2'-deoxy-2'-fluoroguanosine
  modified_base (17)..(17): cm
  modified_base (18)..(18): 2'-deoxy-2'-fluoroadenosine
  modified_base (19)..(19): cm
  modified_base (20)..(20): 2'-deoxy-2'-fluoroguanosine
  modified_base (21)..(21): 2'-O-methyladenosine
augauacaauuaccugcacga

SEQ ID NO: 5742 - RNA, 21 nt, Artificial Sequence
  siRNA sense strand against b2GPI
  modified_base (1)..(1): 2'-deoxy-2'-fluoroguanosine
  modified_base (2)..(2): 2'-O-methyladenosine
  misc_feature (2)..(3): 5'-phosphonothioate
  modified_base (3)..(3): 2'-deoxy-2'-fluorouridine
  modified_base (4)..(4): 2'-O-methyladenosine
  modified_base (5)..(5): 2'-deoxy-2'-fluorocytidine
  modified_base (6)..(6): 2'-O-methyladenosine
  modified_base (7)..(7): 2'-deoxy-2'-fluoroadenosine
  modified_base (8)..(8): um
  modified_base (9)..(9): 2'-deoxy-2'-fluorouridine
  modified_base (10)..(10): 2'-O-methyladenosine
  modified_base (11)..(11): 2'-deoxy-2'-fluorocytidine
  modified_base (12)..(12): 2'-deoxy-2'-fluorocytidine
  modified_base (13)..(13): um
  modified_base (14)..(14): 2'-deoxy-2'-fluoroguanosine
  modified_base (15)..(15): cm
  modified_base (16)..(16): 2'-deoxy-2'-fluoroadenosine
  modified_base (17)..(17): cm
  modified_base (18)..(18): 2'-deoxy-2'-fluoroguanosine
  modified_base (19)..(19): 2'-O-methyladenosine
  modified_base (20)..(20): 2'-deoxy-2'-fluorocytidine
  modified_base (21)..(21): 2'-O-methyladenosine
gauacaauuaccugcacgaca

SEQ ID NO: 5743 - RNA, 21 nt, Artificial Sequence
  siRNA sense strand against b2GPI
  modified_base (1)..(1): 2'-deoxy-2'-fluoroadenosine
  modified_base (2)..(2): um
  misc_feature (2)..(3): 5'-phosphonothioate
  modified_base (3)..(3): 2'-deoxy-2'-fluoroadenosine
  modified_base (4)..(4): cm
  modified_base (5)..(5): 2'-deoxy-2'-fluoroadenosine
  modified_base (6)..(6): 2'-O-methyladenosine
  modified_base (7)..(7): 2'-deoxy-2'-fluorouridine
  modified_base (8)..(8): um
  modified_base (9)..(9): 2'-deoxy-2'-fluoroadenosine
  modified_base (10)..(10): cm
  modified_base (11)..(11): 2'-deoxy-2'-fluorocytidine
  modified_base (12)..(12): 2'-deoxy-2'-fluorouridine
  modified_base (13)..(13): gm
  modified_base (14)..(14): 2'-deoxy-2'-fluorocytidine
  modified_base (15)..(15): 2'-O-methyladenosine
  modified_base (16)..(16): 2'-deoxy-2'-fluorocytidine
  modified_base (17)..(17): gm
  modified_base (18)..(18): 2'-deoxy-2'-fluoroadenosine
  modified_base (19)..(19): cm
  modified_base (20)..(20): 2'-deoxy-2'-fluoroadenosine
  modified_base (21)..(21): cm
auacaauuaccugcacgacac

SEQ ID NO: 5744 - RNA, 21 nt, Artificial Sequence
  siRNA sense strand against b2GPI
  modified_base (1)..(1): 2'-deoxy-2'-fluorouridine
  modified_base (2)..(2): 2'-O-methyladenosine
  misc_feature (2)..(3): 5'-phosphonothioate
  modified_base (3)..(3): 2'-deoxy-2'-fluorocytidine
  modified_base (4)..(4): 2'-O-methyladenosine
  modified_base (5)..(5): 2'-deoxy-2'-fluoroadenosine
  modified_base (6)..(6): um
  modified_base (7)..(7): 2'-deoxy-2'-fluorouridine
  modified_base (8)..(8): 2'-O-methyladenosine
  modified_base (9)..(9): 2'-deoxy-2'-fluorocytidine
  modified_base (10)..(10): cm
  modified_base (11)..(11): 2'-deoxy-2'-fluorouridine
  modified_base (12)..(12): 2'-deoxy-2'-fluoroguanosine
  modified_base (13)..(13): cm
  modified_base (14)..(14): 2'-deoxy-2'-fluoroadenosine
  modified_base (15)..(15): cm
  modified_base (16)..(16): 2'-deoxy-2'-fluoroguanosine
  modified_base (17)..(17): 2'-O-methyladenosine
  modified_base (18)..(18): 2'-deoxy-2'-fluorocytidine
  modified_base (19)..(19): 2'-O-methyladenosine
  modified_base (20)..(20): 2'-deoxy-2'-fluorocytidine
  modified_base (21)..(21): 2'-O-methyladenosine
uacaauuaccugcacgacaca

SEQ ID NO: 5745 - RNA, 21 nt, Artificial Sequence
  siRNA sense strand against b2GPI
  modified_base (1)..(1): 2'-deoxy-2'-fluoroadenosine
  modified_base (2)..(2): cm
  misc_feature (2)..(3): 5'-phosphonothioate
  modified_base (3)..(3): 2'-deoxy-2'-fluoroadenosine
  modified_base (4)..(4): 2'-O-methyladenosine
  modified_base (5)..(5): 2'-deoxy-2'-fluorouridine
  modified_base (6)..(6): um
  modified_base (7)..(7): 2'-deoxy-2'-fluoroadenosine
  modified_base (8)..(8): cm
  modified_base (9)..(9): 2'-deoxy-2'-fluorocytidine
  modified_base (10)..(10): um
  modified_base (11)..(11): 2'-deoxy-2'-fluoroguanosine
  modified_base (12)..(12): 2'-deoxy-2'-fluorocytidine
  modified_base (13)..(13): 2'-O-methyladenosine
  modified_base (14)..(14): 2'-deoxy-2'-fluorocytidine
  modified_base (15)..(15): gm
  modified_base (16)..(16): 2'-deoxy-2'-fluoroadenosine
  modified_base (17)..(17): cm
  modified_base (18)..(18): 2'-deoxy-2'-fluoroadenosine
  modified_base (19)..(19): cm
  modified_base (20)..(20): 2'-deoxy-2'-fluoroadenosine
  modified_base (21)..(21): um
acaauuaccugcacgacacau

SEQ ID NO: 5746 - RNA, 21 nt, Artificial Sequence
  siRNA sense strand against b2GPI
  modified_base (1)..(1): 2'-deoxy-2'-fluorouridine
  modified_base (2)..(2): um
  misc_feature (2)..(3): 5'-phosphonothioate
  modified_base (3)..(3): 2'-deoxy-2'-fluoroadenosine
  modified_base (4)..(4): cm
  modified_base (5)..(5): 2'-deoxy-2'-fluorocytidine
  modified_base (6)..(6): um
  modified_base (7)..(7): 2'-deoxy-2'-fluoroguanosine
  modified_base (8)..(8): cm
  modified_base (9)..(9): 2'-deoxy-2'-fluoroadenosine
  modified_base (10)..(10): cm
  modified_base (11)..(11): 2'-deoxy-2'-fluoroguanosine
  modified_base (12)..(12): 2'-deoxy-2'-fluoroadenosine
  modified_base (13)..(13): cm
  modified_base (14)..(14): 2'-deoxy-2'-fluoroadenosine
  modified_base (15)..(15): cm
  modified_base (16)..(16): 2'-deoxy-2'-fluoroadenosine
  modified_base (17)..(17): um
  modified_base (18)..(18): 2'-deoxy-2'-fluoroguanosine
  modified_base (19)..(19): gm
  modified_base (20)..(20): 2'-deoxy-2'-fluoroadenosine
  modified_base (21)..(21): 2'-O-methyladenosine
uuaccugcacgacacauggaa

SEQ ID NO: 5747 - RNA, 21 nt, Artificial Sequence
  siRNA sense strand against b2GPI
  modified_base (1)..(1): 2'-deoxy-2'-fluorouridine
  modified_base (2)..(2): 2'-O-methyladenosine
  misc_feature (2)..(3): 5'-phosphonothioate
  modified_base (3)..(3): 2'-deoxy-2'-fluorocytidine
  modified_base (4)..(4): cm
  modified_base (5)..(5): 2'-deoxy-2'-fluorouridine
  modified_base (6)..(6): gm
  modified_base (7)..(7): 2'-deoxy-2'-fluorocytidine
  modified_base (8)..(8): 2'-O-methyladenosine
  modified_base (9)..(9): 2'-deoxy-2'-fluorocytidine
  modified_base (10)..(10): gm
  modified_base (11)..(11): 2'-deoxy-2'-fluoroadenosine
  modified_base (12)..(12): 2'-deoxy-2'-fluorocytidine
  modified_base (13)..(13): 2'-O-methyladenosine
  modified_base (14)..(14): 2'-deoxy-2'-fluorocytidine
  modified_base (15)..(15): 2'-O-methyladenosine
  modified_base (16)..(16): 2'-deoxy-2'-fluorouridine
  modified_base (17)..(17): gm
  modified_base (18)..(18): 2'-deoxy-2'-fluoroguanosine
  modified_base (19)..(19): 2'-O-methyladenosine
  modified_base (20)..(20): 2'-deoxy-2'-fluoroadenosine
  modified_base (21)..(21): 2'-O-methyladenosine
uaccugcacgacacauggaaa

SEQ ID NO: 5748 - RNA, 21 nt, Artificial Sequence
  siRNA sense strand against b2GPI
  modified_base (1)..(1): 2'-deoxy-2'-fluoroadenosine
  modified_base (2)..(2): cm
  misc_feature (2)..(3): 5'-phosphonothioate
  modified_base (3)..(3): 2'-deoxy-2'-fluorocytidine
  modified_base (4)..(4): um
  modified_base (5)..(5): 2'-deoxy-2'-fluoroguanosine
  modified_base (6)..(6): cm
  modified_base (7)..(7): 2'-deoxy-2'-fluoroadenosine
  modified_base (8)..(8): cm
  modified_base (9)..(9): 2'-deoxy-2'-fluoroguanosine
  modified_base (10)..(10): 2'-O-methyladenosine
  modified_base (11)..(11): 2'-deoxy-2'-fluorocytidine
  modified_base (12)..(12): 2'-deoxy-2'-fluoroadenosine
  modified_base (13)..(13): cm
  modified_base (14)..(14): 2'-deoxy-2'-fluoroadenosine
  modified_base (15)..(15): um
  modified_base (16)..(16): 2'-deoxy-2'-fluoroguanosine
  modified_base (17)..(17): gm
  modified_base (18)..(18): 2'-deoxy-2'-fluoroadenosine
  modified_base (19)..(19): 2'-O-methyladenosine
  modified_base (20)..(20): 2'-deoxy-2'-fluoroadenosine
  modified_base (21)..(21): um
accugcacgacacauggaaau

SEQ ID NO: 5749 - RNA, 21 nt, Artificial Sequence
  siRNA sense strand against b2GPI
  modified_base (1)..(1): 2'-deoxy-2'-fluoroguanosine
  modified_base (2)..(2): cm
  misc_feature (2)..(3): 5'-phosphonothioate
  modified_base (3)..(3): 2'-deoxy-2'-fluoroadenosine
  modified_base (4)..(4): cm
  modified_base (5)..(5): 2'-deoxy-2'-fluoroguanosine
  modified_base (6)..(6): 2'-O-methyladenosine
  modified_base (7)..(7): 2'-deoxy-2'-fluorocytidine
  modified_base (8)..(8): 2'-O-methyladenosine
  modified_base (9)..(9): 2'-deoxy-2'-fluorocytidine
  modified_base (10)..(10): 2'-O-methyladenosine
  modified_base (11)..(11): 2'-deoxy-2'-fluorouridine
  modified_base (12)..(12): 2'-deoxy-2'-fluoroguanosine
  modified_base (13)..(13): gm
  modified_base (14)..(14): 2'-deoxy-2'-fluoroadenosine
  modified_base (15)..(15): 2'-O-methyladenosine
  modified_base (16)..(16): 2'-deoxy-2'-fluoroadenosine
  modified_base (17)..(17): um
  modified_base (18)..(18): 2'-deoxy-2'-fluorouridine
  modified_base (19)..(19): gm
  modified_base (20)..(20): 2'-deoxy-2'-fluoroguanosine
  modified_base (21)..(21): 2'-O-methyladenosine
gcacgacacauggaaauugga

SEQ ID NO: 5750 - RNA, 21 nt, Artificial Sequence
  siRNA sense strand against b2GPI
  modified_base (1)..(1): 2'-deoxy-2'-fluoroadenosine
  modified_base (2)..(2): cm
  misc_feature (2)..(3): 5'-phosphonothioate
  modified_base (3)..(3): 2'-deoxy-2'-fluoroguanosine
  modified_base (4)..(4): 2'-O-methyladenosine
  modified_base (5)..(5): 2'-deoxy-2'-fluorocytidine
  modified_base (6)..(6): 2'-O-methyladenosine
  modified_base (7)..(7): 2'-deoxy-2'-fluorocytidine
  modified_base (8)..(8): 2'-O-methyladenosine
  modified_base (9)..(9): 2'-deoxy-2'-fluorouridine
  modified_base (10)..(10): gm
  modified_base (11)..(11): 2'-deoxy-2'-fluoroguanosine
  modified_base (12)..(12): 2'-deoxy-2'-fluoroadenosine
  modified_base (13)..(13): 2'-O-methyladenosine
  modified_base (14)..(14): 2'-deoxy-2'-fluoroadenosine
  modified_base (15)..(15): um
  modified_base (16)..(16): 2'-deoxy-2'-fluorouridine
  modified_base (17)..(17): gm
  modified_base (18)..(18): 2'-deoxy-2'-fluoroguanosine
  modified_base (19)..(19): 2'-O-methyladenosine
  modified_base (20)..(20): 2'-deoxy-2'-fluorocytidine
  modified_base (21)..(21): um
acgacacauggaaauuggacu

SEQ ID NO: 5751 - RNA, 21 nt, Artificial Sequence
  siRNA sense strand against b2GPI
  modified_base (1)..(1): 2'-deoxy-2'-fluorocytidine
  modified_base (2)..(2): gm
  misc_feature (2)..(3): 5'-phosphonothioate
  modified_base (3)..(3): 2'-deoxy-2'-fluoroadenosine
  modified_base (4)..(4): cm
  modified_base (5)..(5): 2'-deoxy-2'-fluoroadenosine
  modified_base (6)..(6): cm
  modified_base (7)..(7): 2'-deoxy-2'-fluoroadenosine
  modified_base (8)..(8): um
  modified_base (9)..(9): 2'-deoxy-2'-fluoroguanosine
  modified_base (10)..(10): gm
  modified_base (11)..(11): 2'-deoxy-2'-fluoroadenosine
  modified_base (12)..(12): 2'-deoxy-2'-fluoroadenosine
  modified_base (13)..(13): 2'-O-methyladenosine
  modified_base (14)..(14): 2'-deoxy-2'-fluorouridine
  modified_base (15)..(15): um
  modified_base (16)..(16): 2'-deoxy-2'-fluoroguanosine
  modified_base (17)..(17): gm
  modified_base (18)..(18): 2'-deoxy-2'-fluoroadenosine
  modified_base (19)..(19): cm
  modified_base (20)..(20): 2'-deoxy-2'-fluorouridine
  modified_base (21)..(21): 2'-O-methyladenosine
cgacacauggaaauuggacua

SEQ ID NO: 5752 - RNA, 21 nt, Artificial Sequence
  siRNA sense strand against b2GPI
  modified_base (1)..(1): 2'-deoxy-2'-fluoroadenosine
  modified_base (2)..(2): cm
  misc_feature (2)..(3): 5'-phosphonothioate
  modified_base (3)..(3): 2'-deoxy-2'-fluoroadenosine
  modified_base (4)..(4): cm
  modified_base (5)..(5): 2'-deoxy-2'-fluoroadenosine
  modified_base (6)..(6): um
  modified_base (7)..(7): 2'-deoxy-2'-fluoroguanosine
  modified_base (8)..(8): gm
  modified_base (9)..(9): 2'-deoxy-2'-fluoroadenosine
  modified_base (10)..(10): 2'-O-methyladenosine
  modified_base (11)..(11): 2'-deoxy-2'-fluoroadenosine
  modified_base (12)..(12): 2'-deoxy-2'-fluorouridine
  modified_base (13)..(13): um
  modified_base (14)..(14): 2'-deoxy-2'-fluoroguanosine
  modified_base (15)..(15): gm
  modified_base (16)..(16): 2'-deoxy-2'-fluoroadenosine
  modified_base (17)..(17): cm
  modified_base (18)..(18): 2'-deoxy-2'-fluorouridine
  modified_base (19)..(19): 2'-O-methyladenosine
  modified_base (20)..(20): 2'-deoxy-2'-fluoroadenosine
  modified_base (21)..(21): 2'-O-methyladenosine
acacauggaaauuggacuaaa

SEQ ID NO: 5753 - RNA, 21 nt, Artificial Sequence
  siRNA sense strand against b2GPI
  modified_base (1)..(1): 2'-deoxy-2'-fluorocytidine
  modified_base (2)..(2): 2'-O-methyladenosine
  misc_feature (2)..(3): 5'-phosphonothioate
  modified_base (3)..(3): 2'-deoxy-2'-fluorocytidine
  modified_base (4)..(4): 2'-O-methyladenosine
  modified_base (5)..(5): 2'-deoxy-2'-fluorouridine
  modified_base (6)..(6): gm
  modified_base (7)..(7): 2'-deoxy-2'-fluoroguanosine
  modified_base (8)..(8): 2'-O-methyladenosine
  modified_base (9)..(9): 2'-deoxy-2'-fluoroadenosine
  modified_base (10)..(10): 2'-O-methyladenosine
  modified_base (11)..(11): 2'-deoxy-2'-fluorouridine
  modified_base (12)..(12): 2'-deoxy-2'-fluorouridine
  modified_base (13)..(13): gm
  modified_base (14)..(14): 2'-deoxy-2'-fluoroguanosine
  modified_base (15)..(15): 2'-O-methyladenosine
  modified_base (16)..(16): 2'-deoxy-2'-fluorocytidine
  modified_base (17)..(17): um
  modified_base (18)..(18): 2'-deoxy-2'-fluoroadenosine
  modified_base (19)..(19): 2'-O-methyladenosine
  modified_base (20)..(20): 2'-deoxy-2'-fluoroadenosine
  modified_base (21)..(21): um
cacauggaaauuggacuaaau

SEQ ID NO: 5754 - RNA, 21 nt, Artificial Sequence
  siRNA sense strand against b2GPI
  modified_base (1)..(1): 2'-deoxy-2'-fluoroadenosine
  modified_base (2)..(2): cm
  misc_feature (2)..(3): 5'-phosphonothioate
  modified_base (3)..(3): 2'-deoxy-2'-fluoroadenosine
  modified_base (4)..(4): um
  modified_base (5)..(5): 2'-deoxy-2'-fluoroguanosine
  modified_base (6)..(6): gm
  modified_base (7)..(7): 2'-deoxy-2'-fluoroadenosine
  modified_base (8)..(8): 2'-O-methyladenosine
  modified_base (9)..(9): 2'-deoxy-2'-fluoroadenosine
  modified_base (10)..(10): um
  modified_base (11)..(11): 2'-deoxy-2'-fluorouridine
  modified_base (12)..(12): 2'-deoxy-2'-fluoroguanosine
  modified_base (13)..(13): gm
  modified_base (14)..(14): 2'-deoxy-2'-fluoroadenosine
  modified_base (15)..(15): cm
  modified_base (16)..(16): 2'-deoxy-2'-fluorouridine
  modified_base (17)..(17): 2'-O-methyladenosine
  modified_base (18)..(18): 2'-deoxy-2'-fluoroadenosine
  modified_base (19)..(19): 2'-O-methyladenosine
  modified_base (20)..(20): 2'-deoxy-2'-fluorouridine
  modified_base (21)..(21): um
acauggaaauuggacuaaauu

SEQ ID NO: 5755 - RNA, 21 nt, Artificial Sequence
  siRNA sense strand against b2GPI
  modified_base (1)..(1): 2'-deoxy-2'-fluorocytidine
  modified_base (2)..(2): 2'-O-methyladenosine
  misc_feature (2)..(3): 5'-phosphonothioate
  modified_base (3)..(3): 2'-deoxy-2'-fluorouridine
  modified_base (4)..(4): gm
  modified_base (5)..(5): 2'-deoxy-2'-fluoroguanosine
  modified_base (6)..(6): 2'-O-methyladenosine
  modified_base (7)..(7): 2'-deoxy-2'-fluoroadenosine
  modified_base (8)..(8): 2'-O-methyladenosine
  modified_base (9)..(9): 2'-deoxy-2'-fluorouridine
  modified_base (10)..(10): um
  modified_base (11)..(11): 2'-deoxy-2'-fluoroguanosine
  modified_base (12)..(12): 2'-deoxy-2'-fluoroguanosine
  modified_base (13)..(13): 2'-O-methyladenosine
  modified_base (14)..(14): 2'-deoxy-2'-fluorocytidine
  modified_base (15)..(15): um
  modified_base (16)..(16): 2'-deoxy-2'-fluoroadenosine
  modified_base (17)..(17): 2'-O-methyladenosine
  modified_base (18)..(18): 2'-deoxy-2'-fluoroadenosine
  modified_base (19)..(19): um
  modified_base (20)..(20): 2'-deoxy-2'-fluorouridine
  modified_base (21)..(21): 2'-O-methyladenosine
cauggaaauuggacuaaauua

SEQ ID NO: 5756 - RNA, 21 nt, Artificial Sequence
  siRNA sense strand against b2GPI
  modified_base (1)..(1): 2'-deoxy-2'-fluoroadenosine
  modified_base (2)..(2): um
  misc_feature (2)..(3): 5'-phosphonothioate
  modified_base (3)..(3): 2'-deoxy-2'-fluoroguanosine
  modified_base (4)..(4): gm
  modified_base (5)..(5): 2'-deoxy-2'-fluoroadenosine
  modified_base (6)..(6): 2'-O-methyladenosine
  modified_base (7)..(7): 2'-deoxy-2'-fluoroadenosine
  modified_base (8)..(8): um
  modified_base (9)..(9): 2'-deoxy-2'-fluorouridine
  modified_base (10)..(10): gm
  modified_base (11)..(11): 2'-deoxy-2'-fluoroguanosine
  modified_base (12)..(12): 2'-deoxy-2'-fluoroadenosine
  modified_base (13)..(13): cm
  modified_base (14)..(14): 2'-deoxy-2'-fluorouridine
  modified_base (15)..(15): 2'-O-methyladenosine
  modified_base (16)..(16): 2'-deoxy-2'-fluoroadenosine
  modified_base (17)..(17): 2'-O-methyladenosine
  modified_base (18)..(18): 2'-deoxy-2'-fluorouridine
  modified_base (19)..(19): um
  modified_base (20)..(20): 2'-deoxy-2'-fluoroadenosine
  modified_base (21)..(21): cm
auggaaauuggacuaaauuac

SEQ ID NO: 5757 - RNA, 21 nt, Artificial Sequence
  siRNA sense strand against b2GPI
  modified_base (1)..(1): 2'-deoxy-2'-fluoroguanosine
  modified_base (2)..(2): gm
  misc_feature (2)..(3): 5'-phosphonothioate
  modified_base (3)..(3): 2'-deoxy-2'-fluoroadenosine
  modified_base (4)..(4): 2'-O-methyladenosine
  modified_base (5)..(5): 2'-deoxy-2'-fluoroadenosine
  modified_base (6)..(6): um
  modified_base (7)..(7): 2'-deoxy-2'-fluorouridine
  modified_base (8)..(8): gm
  modified_base (9)..(9): 2'-deoxy-2'-fluoroguanosine
  modified_base (10)..(10): 2'-O-methyladenosine
  modified_base (11)..(11): 2'-deoxy-2'-fluorocytidine
  modified_base (12)..(12): 2'-deoxy-2'-fluorouridine
  modified_base (13)..(13): 2'-O-methyladenosine
  modified_base (14)..(14): 2'-deoxy-2'-fluoroadenosine
  modified_base (15)..(15): 2'-O-methyladenosine
  modified_base (16)..(16): 2'-deoxy-2'-fluorouridine
  modified_base (17)..(17): um
  modified_base (18)..(18): 2'-deoxy-2'-fluoroadenosine
  modified_base (19)..(19): cm
  modified_base (20)..(20): 2'-deoxy-2'-fluorocytidine
  modified_base (21)..(21): 2'-O-methyladenosine
ggaaauuggacuaaauuacca

SEQ ID NO: 5758 - RNA, 21 nt, Artificial Sequence
  siRNA sense strand against b2GPI
  modified_base (1)..(1): 2'-deoxy-2'-fluorouridine
  modified_base (2)..(2): um
  misc_feature (2)..(3): 5'-phosphonothioate
  modified_base (3)..(3): 2'-deoxy-2'-fluoroguanosine
  modified_base (4)..(4): gm
  modified_base (5)..(5): 2'-deoxy-2'-fluoroadenosine
  modified_base (6)..(6): cm
  modified_base (7)..(7): 2'-deoxy-2'-fluorouridine
  modified_base (8)..(8): 2'-O-methyladenosine
  modified_base (9)..(9): 2'-deoxy-2'-fluoroadenosine
  modified_base (10)..(10): 2'-O-methyladenosine
  modified_base (11)..(11): 2'-deoxy-2'-fluorouridine
  modified_base (12)..(12): 2'-deoxy-2'-fluorouridine
  modified_base (13)..(13): 2'-O-methyladenosine
  modified_base (14)..(14): 2'-deoxy-2'-fluorocytidine
  modified_base (15)..(15): cm
  modified_base (16)..(16): 2'-deoxy-2'-fluoroadenosine
  modified_base (17)..(17): gm
  modified_base (18)..(18): 2'-deoxy-2'-fluoroadenosine
  modified_base (19)..(19): 2'-O-methyladenosine
  modified_base (20)..(20): 2'-deoxy-2'-fluorouridine
  modified_base (21)..(21): gm
uuggacuaaauuaccagaaug

SEQ ID NO: 5759 - RNA, 21 nt, Artificial Sequence
  siRNA sense strand against b2GPI
  modified_base (1)..(1): 2'-deoxy-2'-fluorouridine
  modified_base (2)..(2): 2'-O-methyladenosine
  misc_feature (2)..(3): 5'-phosphonothioate
  modified_base (3)..(3): 2'-deoxy-2'-fluorocytidine
  modified_base (4)..(4): cm
  modified_base (5)..(5): 2'-deoxy-2'-fluoroadenosine
  modified_base (6)..(6): gm
  modified_base (7)..(7): 2'-deoxy-2'-fluoroadenosine
  modified_base (8)..(8): 2'-O-methyladenosine
  modified_base (9)..(9): 2'-deoxy-2'-fluorouridine
  modified_base (10)..(10): gm
  modified_base (11)..(11): 2'-deoxy-2'-fluorocytidine
  modified_base (12)..(12): 2'-deoxy-2'-fluoroadenosine
  modified_base (13)..(13): gm
  modified_base (14)..(14): 2'-deoxy-2'-fluoroguanosine
  modified_base (15)..(15): gm
  modified_base (16)..(16): 2'-deoxy-2'-fluoroadenosine
  modified_base (17)..(17): 2'-O-methyladenosine
  modified_base (18)..(18): 2'-deoxy-2'-fluoroguanosine
  modified_base (19)..(19): um
  modified_base (20)..(20): 2'-deoxy-2'-fluoroadenosine
  modified_base (21)..(21): 2'-O-methyladenosine
uaccagaaugcagggaaguaa

SEQ ID NO: 5760 - RNA, 21 nt, Artificial Sequence
  siRNA sense strand against b2GPI
  modified_base (1)..(1): 2'-deoxy-2'-fluoroadenosine
  modified_base (2)..(2): cm
  misc_feature (2)..(3): 5'-phosphonothioate
  modified_base (3)..(3): 2'-deoxy-2'-fluorocytidine
  modified_base (4)..(4): 2'-O-methyladenosine
  modified_base (5)..(5): 2'-deoxy-2'-fluoroguanosine
  modified_base (6)..(6): 2'-O-methyladenosine
  modified_base (7)..(7): 2'-deoxy-2'-fluoroadenosine
  modified_base (8)..(8): um
  modified_base (9)..(9): 2'-deoxy-2'-fluoroguanosine
  modified_base (10)..(10): cm
  modified_base (11)..(11): 2'-deoxy-2'-fluoroadenosine
  modified_base (12)..(12): 2'-deoxy-2'-fluoroguanosine
  modified_base (13)..(13): gm
  modified_base (14)..(14): 2'-deoxy-2'-fluoroguanosine
  modified_base (15)..(15): 2'-O-methyladenosine
  modified_base (16)..(16): 2'-deoxy-2'-fluoroadenosine
  modified_base (17)..(17): gm
  modified_base (18)..(18): 2'-deoxy-2'-fluorouridine
  modified_base (19)..(19): 2'-O-methyladenosine
  modified_base (20)..(20): 2'-deoxy-2'-fluoroadenosine
  modified_base (21)..(21): 2'-O-methyladenosine
accagaaugcagggaaguaaa

SEQ ID NO: 5761 - RNA, 21 nt, Artificial Sequence
  siRNA sense strand against b2GPI
  modified_base (1)..(1): 2'-deoxy-2'-fluorocytidine
  modified_base (2)..(2): cm
  misc_feature (2)..(3): 5'-phosphonothioate
  modified_base (3)..(3): 2'-deoxy-2'-fluoroadenosine
  modified_base (4)..(4): gm
  modified_base (5)..(5): 2'-deoxy-2'-fluoroadenosine
  modified_base (6)..(6): 2'-O-methyladenosine
  modified_base (7)..(7): 2'-deoxy-2'-fluorouridine
  modified_base (8)..(8): gm
  modified_base (9)..(9): 2'-deoxy-2'-fluorocytidine
  modified_base (10)..(10): 2'-O-methyladenosine
  modified_base (11)..(11): 2'-deoxy-2'-fluoroguanosine
  modified_base (12)..(12): 2'-deoxy-2'-fluoroguanosine
  modified_base (13)..(13): gm
  modified_base (14)..(14): 2'-deoxy-2'-fluoroadenosine
  modified_base (15)..(15): 2'-O-methyladenosine
  modified_base (16)..(16): 2'-deoxy-2'-fluoroguanosine
  modified_base (17)..(17): um
  modified_base (18)..(18): 2'-deoxy-2'-fluoroadenosine
  modified_base (19)..(19): 2'-O-methyladenosine
  modified_base (20)..(20): 2'-deoxy-2'-fluoroadenosine
  modified_base (21)..(21): 2'-O-methyladenosine
ccagaaugcagggaaguaaaa

SEQ ID NO: 5762 - RNA, 21 nt, Artificial Sequence
  siRNA sense strand against b2GPI
  modified_base (1)..(1): 2'-deoxy-2'-fluorocytidine
  modified_base (2)..(2): 2'-O-methyladenosine
  misc_feature (2)..(3): 5'-phosphonothioate
  modified_base (3)..(3): 2'-deoxy-2'-fluoroguanosine
  modified_base (4)..(4): 2'-O-methyladenosine
  modified_base (5)..(5): 2'-deoxy-2'-fluoroadenosine
  modified_base (6)..(6): um
  modified_base (7)..(7): 2'-deoxy-2'-fluoroguanosine
  modified_base (8)..(8): cm
  modified_base (9)..(9): 2'-deoxy-2'-fluoroadenosine
  modified_base (10)..(10): gm
  modified_base (11)..(11): 2'-deoxy-2'-fluoroguanosine
  modified_base (12)..(12): 2'-deoxy-2'-fluoroguanosine
  modified_base (13)..(13): 2'-O-methyladenosine
  modified_base (14)..(14): 2'-deoxy-2'-fluoroadenosine
  modified_base (15)..(15): gm
  modified_base (16)..(16): 2'-deoxy-2'-fluorouridine
  modified_base (17)..(17): 2'-O-methyladenosine
  modified_base (18)..(18): 2'-deoxy-2'-fluoroadenosine
  modified_base (19)..(19): 2'-O-methyladenosine
  modified_base (20)..(20): 2'-deoxy-2'-fluoroadenosine
  modified_base (21)..(21): um
cagaaugcagggaaguaaaau

SEQ ID NO: 5763 - RNA, 21 nt, Artificial Sequence
  siRNA sense strand against b2GPI
  modified_base (1)..(1): 2'-deoxy-2'-fluoroadenosine
  modified_base (2)..(2): gm
  misc_feature (2)..(3): 5'-phosphonothioate
  modified_base (3)..(3): 2'-deoxy-2'-fluoroadenosine
  modified_base (4)..(4): 2'-O-methyladenosine
  modified_base (5)..(5): 2'-deoxy-2'-fluorouridine
  modified_base (6)..(6): gm
  modified_base (7)..(7): 2'-deoxy-2'-fluorocytidine
  modified_base (8)..(8): 2'-O-methyladenosine
  modified_base (9)..(9): 2'-deoxy-2'-fluoroguanosine
  modified_base (10)..(10): gm
  modified_base (11)..(11): 2'-deoxy-2'-fluoroguanosine
  modified_base (12)..(12): 2'-deoxy-2'-fluoroadenosine
  modified_base (13)..(13): 2'-O-methyladenosine
  modified_base (14)..(14): 2'-deoxy-2'-fluoroguanosine
  modified_base (15)..(15): um
  modified_base (16)..(16): 2'-deoxy-2'-fluoroadenosine
  modified_base (17)..(17): 2'-O-methyladenosine
  modified_base (18)..(18): 2'-deoxy-2'-fluoroadenosine
  modified_base (19)..(19): 2'-O-methyladenosine
  modified_base (20)..(20): 2'-deoxy-2'-fluorouridine
  modified_base (21)..(21): gm
agaaugcagggaaguaaaaug

SEQ ID NO: 5764 - RNA, 21 nt, Artificial Sequence
  siRNA sense strand against b2GPI
  modified_base (1)..(1): 2'-deoxy-2'-fluorouridine
  modified_base (2)..(2): gm
  misc_feature (2)..(3): 5'-phosphonothioate
  modified_base (3)..(3): 2'-deoxy-2'-fluorocytidine
  modified_base (4)..(4): 2'-O-methyladenosine
  modified_base (5)..(5): 2'-deoxy-2'-fluoroguanosine
  modified_base (6)..(6): gm
  modified_base (7)..(7): 2'-deoxy-2'-fluoroguanosine
  modified_base (8)..(8): 2'-O-methyladenosine
  modified_base (9)..(9): 2'-deoxy-2'-fluoroadenosine
  modified_base (10)..(10): gm
  modified_base (11)..(11): 2'-deoxy-2'-fluorouridine
  modified_base (12)..(12): 2'-deoxy-2'-fluoroadenosine
  modified_base (13)..(13): 2'-O-methyladenosine
  modified_base (14)..(14): 2'-deoxy-2'-fluoroadenosine
  modified_base (15)..(15): 2'-O-methyladenosine
  modified_base (16)..(16): 2'-deoxy-2'-fluorouridine
  modified_base (17)..(17): gm
  modified_base (18)..(18): 2'-deoxy-2'-fluorocytidine
  modified_base (19)..(19): cm
  modified_base (20)..(20): 2'-deoxy-2'-fluorocytidine
  modified_base (21)..(21): 2'-O-methyladenosine
ugcagggaaguaaaaugccca

SEQ ID NO: 5765 - RNA, 21 nt, Artificial Sequence
  siRNA sense strand against b2GPI
  modified_base (1)..(1): 2'-deoxy-2'-fluoroguanosine
  modified_base (2)..(2): gm
  misc_feature (2)..(3): 5'-phosphonothioate
  modified_base (3)..(3): 2'-deoxy-2'-fluoroguanosine
  modified_base (4)..(4): 2'-O-methyladenosine
  modified_base (5)..(5): 2'-deoxy-2'-fluoroadenosine
  modified_base (6)..(6): gm
  modified_base (7)..(7): 2'-deoxy-2'-fluorouridine
  modified_base (8)..(8): 2'-O-methyladenosine
  modified_base (9)..(9): 2'-deoxy-2'-fluoroadenosine
  modified_base (10)..(10): 2'-O-methyladenosine
  modified_base (11)..(11): 2'-deoxy-2'-fluoroadenosine
  modified_base (12)..(12): 2'-deoxy-2'-fluorouridine
  modified_base (13)..(13): gm
  modified_base (14)..(14): 2'-deoxy-2'-fluorocytidine
  modified_base (15)..(15): cm
  modified_base (16)..(16): 2'-deoxy-2'-fluorocytidine
  modified_base (17)..(17): 2'-O-methyladenosine
  modified_base (18)..(18): 2'-deoxy-2'-fluorouridine
  modified_base (19)..(19): um
  modified_base (20)..(20): 2'-deoxy-2'-fluorocytidine
  modified_base (21)..(21): cm
gggaaguaaaaugcccauucc

SEQ ID NO: 5766 - RNA, 21 nt, Artificial Sequence
  siRNA sense strand against b2GPI
  modified_base (1)..(1): 2'-deoxy-2'-fluoroadenosine
  modified_base (2)..(2): 2'-O-methyladenosine
  misc_feature (2)..(3): 5'-phosphonothioate
  modified_base (3)..(3): 2'-deoxy-2'-fluoroguanosine
  modified_base (4)..(4): um
  modified_base (5)..(5): 2'-deoxy-2'-fluoroadenosine
  modified_base (6)..(6): 2'-O-methyladenosine
  modified_base (7)..(7): 2'-deoxy-2'-fluoroadenosine
  modified_base (8)..(8): 2'-O-methyladenosine
  modified_base (9)..(9): 2'-deoxy-2'-fluorouridine
  modified_base (10)..(10): gm
  modified_base (11)..(11): 2'-deoxy-2'-fluorocytidine
  modified_base (12)..(12): 2'-deoxy-2'-fluorocytidine
  modified_base (13)..(13): cm
  modified_base (14)..(14): 2'-deoxy-2'-fluoroadenosine
  modified_base (15)..(15): um
  modified_base (16)..(16): 2'-deoxy-2'-fluorouridine
  modified_base (17)..(17): cm
  modified_base (18)..(18): 2'-deoxy-2'-fluorocytidine
  modified_base (19)..(19): cm
  modified_base (20)..(20): 2'-deoxy-2'-fluoroadenosine
  modified_base (21)..(21): um
aaguaaaaugcccauucccau

SEQ ID NO: 5767 - RNA, 21 nt, Artificial Sequence
  siRNA sense strand against b2GPI
  modified_base (1)..(1): 2'-deoxy-2'-fluoroadenosine
  modified_base (2)..(2): 2'-O-methyladenosine
  misc_feature (2)..(3): 5'-phosphonothioate
  modified_base (3)..(3): 2'-deoxy-2'-fluoroadenosine
  modified_base (4)..(4): um
  modified_base (5)..(5): 2'-deoxy-2'-fluoroguanosine
  modified_base (6)..(6): cm
  modified_base (7)..(7): 2'-deoxy-2'-fluorocytidine
  modified_base (8)..(8): cm
  modified_base (9)..(9): 2'-deoxy-2'-fluoroadenosine
  modified_base (10)..(10): um
  modified_base (11)..(11): 2'-deoxy-2'-fluorouridine
  modified_base (12)..(12): 2'-deoxy-2'-fluorocytidine
  modified_base (13)..(13): cm
  modified_base (14)..(14): 2'-deoxy-2'-fluorocytidine
  modified_base (15)..(15): 2'-O-methyladenosine
  modified_base (16)..(16): 2'-deoxy-2'-fluorouridine
  modified_base (17)..(17): cm
  modified_base (18)..(18): 2'-deoxy-2'-fluoroadenosine
  modified_base (19)..(19): 2'-O-methyladenosine
  modified_base (20)..(20): 2'-deoxy-2'-fluoroguanosine
  modified_base (21)..(21): 2'-O-methyladenosine
aaaugcccauucccaucaaga

SEQ ID NO: 5768 - RNA, 21 nt, Artificial Sequence
  siRNA sense strand against b2GPI
  modified_base (1)..(1): 2'-deoxy-2'-fluoroadenosine
  modified_base (2)..(2): 2'-O-methyladenosine
  misc_feature (2)..(3): 5'-phosphonothioate
  modified_base (3)..(3): 2'-deoxy-2'-fluorouridine
  modified_base (4)..(4): gm
  modified_base (5)..(5): 2'-deoxy-2'-fluorocytidine
  modified_base (6)..(6): cm
  modified_base (7)..(7): 2'-deoxy-2'-fluorocytidine
  modified_base (8)..(8): 2'-O-methyladenosine
  modified_base (9)..(9): 2'-deoxy-2'-fluorouridine
  modified_base (10)..(10): um
  modified_base (11)..(11): 2'-deoxy-2'-fluorocytidine
  modified_base (12)..(12): 2'-deoxy-2'-fluorocytidine
  modified_base (13)..(13): cm
  modified_base (14)..(14): 2'-deoxy-2'-fluoroadenosine
  modified_base (15)..(15): um
  modified_base (16)..(16): 2'-deoxy-2'-fluorocytidine
  modified_base (17)..(17): 2'-O-methyladenosine
  modified_base (18)..(18): 2'-deoxy-2'-fluoroadenosine
  modified_base (19)..(19): gm
  modified_base (20)..(20): 2'-deoxy-2'-fluoroadenosine
  modified_base (21)..(21): cm
aaugcccauucccaucaagac

SEQ ID NO: 5769 - RNA, 21 nt, Artificial Sequence
  siRNA sense strand against b2GPI
  modified_base (1)..(1): 2'-deoxy-2'-fluorouridine
  modified_base (2)..(2): gm
  misc_feature (2)..(3): 5'-phosphonothioate
  modified_base (3)..(3): 2'-deoxy-2'-fluorocytidine
  modified_base (4)..(4): cm
  modified_base (5)..(5): 2'-deoxy-2'-fluorocytidine
  modified_base (6)..(6): 2'-O-methyladenosine
  modified_base (7)..(7): 2'-deoxy-2'-fluorouridine
  modified_base (8)..(8): um
  modified_base (9)..(9): 2'-deoxy-2'-fluorocytidine
  modified_base (10)..(10): cm
  modified_base (11)..(11): 2'-deoxy-2'-fluorocytidine
  modified_base (12)..(12): 2'-deoxy-2'-fluoroadenosine
  modified_base (13)..(13): um
  modified_base (14)..(14): 2'-deoxy-2'-fluorocytidine
  modified_base (15)..(15): 2'-O-methyladenosine
  modified_base (16)..(16): 2'-deoxy-2'-fluoroadenosine
  modified_base (17)..(17): gm
  modified_base (18)..(18): 2'-deoxy-2'-fluoroadenosine
  modified_base (19)..(19): cm
  modified_base (20)..(20): 2'-deoxy-2'-fluorocytidine
  modified_base (21)..(21): 2'-O-methyladenosine
ugcccauucccaucaagacca

SEQ ID NO: 5770 - RNA, 21 nt, Artificial Sequence
  siRNA sense strand against b2GPI
  modified_base (1)..(1): 2'-deoxy-2'-fluoroguanosine
  modified_base (2)..(2): cm
  misc_feature (2)..(3): 5'-phosphonothioate
  modified_base (3)..(3): 2'-deoxy-2'-fluorocytidine
  modified_base (4)..(4): cm
  modified_base (5)..(5): 2'-deoxy-2'-fluoroadenosine
  modified_base (6)..(6): um
  modified_base (7)..(7): 2'-deoxy-2'-fluorouridine
  modified_base (8)..(8): cm
  modified_base (9)..(9): 2'-deoxy-2'-fluorocytidine
  modified_base (10)..(10): cm
  modified_base (11)..(11): 2'-deoxy-2'-fluoroadenosine
  modified_base (12)..(12): 2'-deoxy-2'-fluorouridine
  modified_base (13)..(13): cm
  modified_base (14)..(14): 2'-deoxy-2'-fluoroadenosine
  modified_base (15)..(15): 2'-O-methyladenosine
  modified_base (16)..(16): 2'-deoxy-2'-fluoroguanosine
  modified_base (17)..(17): 2'-O-methyladenosine
  modified_base (18)..(18): 2'-deoxy-2'-fluorocytidine
  modified_base (19)..(19): cm
  modified_base (20)..(20): 2'-deoxy-2'-fluoroadenosine
  modified_base (21)..(21): gm
gcccauucccaucaagaccag

SEQ ID NO: 5771 - RNA, 21 nt, Artificial Sequence
  siRNA sense strand against b2GPI
  modified_base (1)..(1): 2'-deoxy-2'-fluorocytidine
  modified_base (2)..(2): cm
  misc_feature (2)..(3): 5'-phosphonothioate
  modified_base (3)..(3): 2'-deoxy-2'-fluorocytidine
  modified_base (4)..(4): 2'-O-methyladenosine
  modified_base (5)..(5): 2'-deoxy-2'-fluorouridine
  modified_base (6)..(6): um
  modified_base (7)..(7): 2'-deoxy-2'-fluorocytidine
  modified_base (8)..(8): cm
  modified_base (9)..(9): 2'-deoxy-2'-fluorocytidine
  modified_base (10)..(10): 2'-O-methyladenosine
  modified_base (11)..(11): 2'-deoxy-2'-fluorouridine
  modified_base (12)..(12): 2'-deoxy-2'-fluorocytidine
  modified_base (13)..(13): 2'-O-methyladenosine
  modified_base (14)..(14): 2'-deoxy-2'-fluoroadenosine
  modified_base (15)..(15): gm
  modified_base (16)..(16): 2'-deoxy-2'-fluoroadenosine
  modified_base (17)..(17): cm
  modified_base (18)..(18): 2'-deoxy-2'-fluorocytidine
  modified_base (19)..(19): 2'-O-methyladenosine
  modified_base (20)..(20): 2'-deoxy-2'-fluoroguanosine
  modified_base (21)..(21): 2'-O-methyladenosine
cccauucccaucaagaccaga

SEQ ID NO: 5772 - RNA, 21 nt, Artificial Sequence
  siRNA sense strand against b2GPI
  modified_base (1)..(1): 2'-deoxy-2'-fluorouridine
  modified_base (2)..(2): um
  misc_feature (2)..(3): 5'-phosphonothioate
  modified_base (3)..(3): 2'-deoxy-2'-fluorocytidine
  modified_base (4)..(4): cm
  modified_base (5)..(5): 2'-deoxy-2'-fluorocytidine
  modified_base (6)..(6): 2'-O-methyladenosine
  modified_base (7)..(7): 2'-deoxy-2'-fluorouridine
  modified_base (8)..(8): cm
  modified_base (9)..(9): 2'-deoxy-2'-fluoroadenosine
  modified_base (10)..(10): 2'-O-methyladenosine
  modified_base (11)..(11): 2'-deoxy-2'-fluoroguanosine
  modified_base (12)..(12): 2'-deoxy-2'-fluoroadenosine
  modified_base (13)..(13): cm
  modified_base (14)..(14): 2'-deoxy-2'-fluorocytidine
  modified_base (15)..(15): 2'-O-methyladenosine
  modified_base (16)..(16): 2'-deoxy-2'-fluoroguanosine
  modified_base (17)..(17): 2'-O-methyladenosine
  modified_base (18)..(18): 2'-deoxy-2'-fluorocytidine
  modified_base (19)..(19): 2'-O-methyladenosine
  modified_base (20)..(20): 2'-deoxy-2'-fluoroadenosine
  modified_base (21)..(21): um
uucccaucaagaccagacaau

SEQ ID NO: 5773 - RNA, 21 nt, Artificial Sequence
  siRNA sense strand against b2GPI
  modified_base (1)..(1): 2'-deoxy-2'-fluorouridine
  modified_base (2)..(2): cm
  misc_feature (2)..(3): 5'-phosphonothioate
  modified_base (3)..(3): 2'-deoxy-2'-fluorocytidine
  modified_base (4)..(4): cm
  modified_base (5)..(5): 2'-deoxy-2'-fluoroadenosine
  modified_base (6)..(6): um
  modified_base (7)..(7): 2'-deoxy-2'-fluorocytidine
  modified_base (8)..(8): 2'-O-methyladenosine
  modified_base (9)..(9): 2'-deoxy-2'-fluoroadenosine
  modified_base (10)..(10): gm
  modified_base (11)..(11): 2'-deoxy-2'-fluoroadenosine
  modified_base (12)..(12): 2'-deoxy-2'-fluorocytidine
  modified_base (13)..(13): cm
  modified_base (14)..(14): 2'-deoxy-2'-fluoroadenosine
  modified_base (15)..(15): gm
  modified_base (16)..(16): 2'-deoxy-2'-fluoroadenosine
  modified_base (17)..(17): cm
  modified_base (18)..(18): 2'-deoxy-2'-fluoroadenosine
  modified_base (19)..(19): 2'-O-methyladenosine
  modified_base (20)..(20): 2'-deoxy-2'-fluorouridine
  modified_base (21)..(21): gm
ucccaucaagaccagacaaug

SEQ ID NO: 5774 - RNA, 21 nt, Artificial Sequence
  siRNA sense strand against b2GPI
  modified_base (1)..(1): 2'-deoxy-2'-fluorocytidine
  modified_base (2)..(2): cm
  misc_feature (2)..(3): 5'-phosphonothioate
  modified_base (3)..(3): 2'-deoxy-2'-fluorocytidine
  modified_base (4)..(4): 2'-O-methyladenosine
  modified_base (5)..(5): 2'-deoxy-2'-fluorouridine
  modified_base (6)..(6): cm
  modified_base (7)..(7): 2'-deoxy-2'-fluoroadenosine
  modified_base (8)..(8): 2'-O-methyladenosine
  modified_base (9)..(9): 2'-deoxy-2'-fluoroguanosine
  modified_base (10)..(10): 2'-O-methyladenosine
  modified_base (11)..(11): 2'-deoxy-2'-fluorocytidine
  modified_base (12)..(12): 2'-deoxy-2'-fluorocytidine
  modified_base (13)..(13): 2'-O-methyladenosine
  modified_base (14)..(14): 2'-deoxy-2'-fluoroguanosine
  modified_base (15)..(15): 2'-O-methyladenosine
  modified_base (16)..(16): 2'-deoxy-2'-fluorocytidine
  modified_base (17)..(17): 2'-O-methyladenosine
  modified_base (18)..(18): 2'-deoxy-2'-fluoroadenosine
  modified_base (19)..(19): um
  modified_base (20)..(20): 2'-deoxy-2'-fluoroguanosine
  modified_base (21)..(21): gm
cccaucaagaccagacaaugg

SEQ ID NO: 5775 - RNA, 21 nt, Artificial Sequence
  siRNA sense strand against b2GPI
  modified_base (1)..(1): 2'-deoxy-2'-fluorocytidine
  modified_base (2)..(2): cm
  misc_feature (2)..(3): 5'-phosphonothioate
  modified_base (3)..(3): 2'-deoxy-2'-fluoroadenosine
  modified_base (4)..(4): um
  modified_base (5)..(5): 2'-deoxy-2'-fluorocytidine
  modified_base (6)..(6): 2'-O-methyladenosine
  modified_base (7)..(7): 2'-deoxy-2'-fluoroadenosine
  modified_base (8)..(8): gm
  modified_base (9)..(9): 2'-deoxy-2'-fluoroadenosine
  modified_base (10)..(10): cm
  modified_base (11)..(11): 2'-deoxy-2'-fluorocytidine
  modified_base (12)..(12): 2'-deoxy-2'-fluoroadenosine
  modified_base (13)..(13): gm
  modified_base (14)..(14): 2'-deoxy-2'-fluoroadenosine
  modified_base (15)..(15): cm
  modified_base (16)..(16): 2'-deoxy-2'-fluoroadenosine
  modified_base (17)..(17): 2'-O-methyladenosine
  modified_base (18)..(18): 2'-deoxy-2'-fluorouridine
  modified_base (19)..(19): gm
  modified_base (20)..(20): 2'-deoxy-2'-fluoroguanosine
  modified_base (21)..(21): 2'-O-methyladenosine
ccaucaagaccagacaaugga

SEQ ID NO: 5776 - RNA, 21 nt, Artificial Sequence
  siRNA sense strand against b2GPI
  modified_base (1)..(1): 2'-deoxy-2'-fluorocytidine
  modified_base (2)..(2): 2'-O-methyladenosine
  misc_feature (2)..(3): 5'-phosphonothioate
  modified_base (3)..(3): 2'-deoxy-2'-fluorouridine
  modified_base (4)..(4): cm
  modified_base (5)..(5): 2'-deoxy-2'-fluoroadenosine
  modified_base (6)..(6): 2'-O-methyladenosine
  modified_base (7)..(7): 2'-deoxy-2'-fluoroguanosine
  modified_base (8)..(8): 2'-O-methyladenosine
  modified_base (9)..(9): 2'-deoxy-2'-fluorocytidine
  modified_base (10)..(10): cm
  modified_base (11)..(11): 2'-deoxy-2'-fluoroadenosine
  modified_base (12)..(12): 2'-deoxy-2'-fluoroguanosine
  modified_base (13)..(13): 2'-O-methyladenosine
  modified_base (14)..(14): 2'-deoxy-2'-fluorocytidine
  modified_base (15)..(15): 2'-O-methyladenosine
  modified_base (16)..(16): 2'-deoxy-2'-fluoroadenosine
  modified_base (17)..(17): um
  modified_base (18)..(18): 2'-deoxy-2'-fluoroguanosine
  modified_base (19)..(19): gm
  modified_base (20)..(20): 2'-deoxy-2'-fluoroadenosine
  modified_base (21)..(21): um
caucaagaccagacaauggau

SEQ ID NO: 5777 - RNA, 21 nt, Artificial Sequence
  siRNA sense strand against b2GPI
  modified_base (1)..(1): 2'-deoxy-2'-fluoroadenosine
  modified_base (2)..(2): um
  misc_feature (2)..(3): 5'-phosphonothioate
  modified_base (3)..(3): 2'-deoxy-2'-fluorocytidine
  modified_base (4)..(4): 2'-O-methyladenosine
  modified_base (5)..(5): 2'-deoxy-2'-fluoroadenosine
  modified_base (6)..(6): gm
  modified_base (7)..(7): 2'-deoxy-2'-fluoroadenosine
  modified_base (8)..(8): cm
  modified_base (9)..(9): 2'-deoxy-2'-fluorocytidine
  modified_base (10)..(10): 2'-O-methyladenosine
  modified_base (11)..(11): 2'-deoxy-2'-fluoroguanosine
  modified_base (12)..(12): 2'-deoxy-2'-fluoroadenosine
  modified_base (13)..(13): cm
  modified_base (14)..(14): 2'-deoxy-2'-fluoroadenosine
  modified_base (15)..(15): 2'-O-methyladenosine
  modified_base (16)..(16): 2'-deoxy-2'-fluorouridine
  modified_base (17)..(17): gm
  modified_base (18)..(18): 2'-deoxy-2'-fluoroguanosine
  modified_base (19)..(19): 2'-O-methyladenosine
  modified_base (20)..(20): 2'-deoxy-2'-fluorouridine
  modified_base (21)..(21): um
aucaagaccagacaauggauu

SEQ ID NO: 5778 - RNA, 21 nt, Artificial Sequence
  siRNA sense strand against b2GPI
  modified_base (1)..(1): 2'-deoxy-2'-fluorouridine
  modified_base (2)..(2): cm
  misc_feature (2)..(3): 5'-phosphonothioate
  modified_base (3)..(3): 2'-deoxy-2'-fluoroadenosine
  modified_base (4)..(4): 2'-O-methyladenosine
  modified_base (5)..(5): 2'-deoxy-2'-fluoroguanosine
  modified_base (6)..(6): 2'-O-methyladenosine
  modified_base (7)..(7): 2'-deoxy-2'-fluorocytidine
  modified_base (8)..(8): cm
  modified_base (9)..(9): 2'-deoxy-2'-fluoroadenosine
  modified_base (10)..(10): gm
  modified_base (11)..(11): 2'-deoxy-2'-fluoroadenosine
  modified_base (12)..(12): 2'-deoxy-2'-fluorocytidine
  modified_base (13)..(13): 2'-O-methyladenosine
  modified_base (14)..(14): 2'-deoxy-2'-fluoroadenosine
  modified_base (15)..(15): um
  modified_base (16)..(16): 2'-deoxy-2'-fluoroguanosine
  modified_base (17)..(17): gm
  modified_base (18)..(18): 2'-deoxy-2'-fluoroadenosine
  modified_base (19)..(19): um
  modified_base (20)..(20): 2'-deoxy-2'-fluorouridine
  modified_base (21)..(21): um
ucaagaccagacaauggauuu

SEQ ID NO: 5779 - RNA, 21 nt, Artificial Sequence
  siRNA sense strand against b2GPI
  modified_base (1)..(1): 2'-deoxy-2'-fluorocytidine
  modified_base (2)..(2): 2'-O-methyladenosine
  misc_feature (2)..(3): 5'-phosphonothioate
  modified_base (3)..(3): 2'-deoxy-2'-fluoroadenosine
  modified_base (4)..(4): gm
  modified_base (5)..(5): 2'-deoxy-2'-fluoroadenosine
  modified_base (6)..(6): cm
  modified_base (7)..(7): 2'-deoxy-2'-fluorocytidine
  modified_base (8)..(8): 2'-O-methyladenosine
  modified_base (9)..(9): 2'-deoxy-2'-fluoroguanosine
  modified_base (10)..(10): 2'-O-methyladenosine
  modified_base (11)..(11): 2'-deoxy-2'-fluorocytidine
  modified_base (12)..(12): 2'-deoxy-2'-fluoroadenosine
  modified_base (13)..(13): 2'-O-methyladenosine
  modified_base (14)..(14): 2'-deoxy-2'-fluorouridine
  modified_base (15)..(15): gm
  modified_base (16)..(16): 2'-deoxy-2'-fluoroguanosine
  modified_base (17)..(17): 2'-O-methyladenosine
  modified_base (18)..(18): 2'-deoxy-2'-fluorouridine
  modified_base (19)..(19): um
  modified_base (20)..(20): 2'-deoxy-2'-fluorouridine
  modified_base (21)..(21): gm
caagaccagacaauggauuug

SEQ ID NO: 5780 - RNA, 21 nt, Artificial Sequence
  siRNA sense strand against b2GPI
  modified_base (1)..(1): 2'-deoxy-2'-fluoroadenosine
  modified_base (2)..(2): gm
  misc_feature (2)..(3): 5'-phosphonothioate
  modified_base (3)..(3): 2'-deoxy-2'-fluoroadenosine
  modified_base (4)..(4): cm
  modified_base (5)..(5): 2'-deoxy-2'-fluorocytidine
  modified_base (6)..(6): 2'-O-methyladenosine
  modified_base (7)..(7): 2'-deoxy-2'-fluoroguanosine
  modified_base (8)..(8): 2'-O-methyladenosine
  modified_base (9)..(9): 2'-deoxy-2'-fluorocytidine
  modified_base (10)..(10): 2'-O-methyladenosine
  modified_base (11)..(11): 2'-deoxy-2'-fluoroadenosine
  modified_base (12)..(12): 2'-deoxy-2'-fluorouridine
  modified_base (13)..(13): gm
  modified_base (14)..(14): 2'-deoxy-2'-fluoroguanosine
  modified_base (15)..(15): 2'-O-methyladenosine
  modified_base (16)..(16): 2'-deoxy-2'-fluorouridine
  modified_base (17)..(17): um
  modified_base (18)..(18): 2'-deoxy-2'-fluorouridine
  modified_base (19)..(19): gm
  modified_base (20)..(20): 2'-deoxy-2'-fluorouridine
  modified_base (21)..(21): gm
agaccagacaauggauuugug

SEQ ID NO: 5781 - RNA, 21 nt, Artificial Sequence
  siRNA sense strand against b2GPI
  modified_base (1)..(1): 2'-deoxy-2'-fluoroguanosine
  modified_base (2)..(2): 2'-O-methyladenosine
  misc_feature (2)..(3): 5'-phosphonothioate
  modified_base (3)..(3): 2'-deoxy-2'-fluorocytidine
  modified_base (4)..(4): cm
  modified_base (5)..(5): 2'-deoxy-2'-fluoroadenosine
  modified_base (6)..(6): gm
  modified_base (7)..(7): 2'-deoxy-2'-fluoroadenosine
  modified_base (8)..(8): cm
  modified_base (9)..(9): 2'-deoxy-2'-fluoroadenosine
  modified_base (10)..(10): 2'-O-methyladenosine
  modified_base (11)..(11): 2'-deoxy-2'-fluorouridine
  modified_base (12)..(12): 2'-deoxy-2'-fluoroguanosine
  modified_base (13)..(13): gm
  modified_base (14)..(14): 2'-deoxy-2'-fluoroadenosine
  modified_base (15)..(15): um
  modified_base (16)..(16): 2'-deoxy-2'-fluorouridine
  modified_base (17)..(17): um
  modified_base (18)..(18): 2'-deoxy-2'-fluoroguanosine
  modified_base (19)..(19): um
  modified_base (20)..(20): 2'-deoxy-2'-fluoroguanosine
  modified_base (21)..(21): 2'-O-methyladenosine
gaccagacaauggauuuguga

SEQ ID NO: 5782 - RNA, 21 nt, Artificial Sequence
  siRNA sense strand against b2GPI
  modified_base (1)..(1): 2'-deoxy-2'-fluoroadenosine
  modified_base (2)..(2): cm
  misc_feature (2)..(3): 5'-phosphonothioate
  modified_base (3)..(3): 2'-deoxy-2'-fluorocytidine
  modified_base (4)..(4): 2'-O-methyladenosine
  modified_base (5)..(5): 2'-deoxy-2'-fluoroguanosine
  modified_base (6)..(6): 2'-O-methyladenosine
  modified_base (7)..(7): 2'-deoxy-2'-fluorocytidine
  modified_base (8)..(8): 2'-O-methyladenosine
  modified_base (9)..(9): 2'-deoxy-2'-fluoroadenosine
  modified_base (10)..(10): um
  modified_base (11)..(11): 2'-deoxy-2'-fluoroguanosine
  modified_base (12)..(12): 2'-deoxy-2'-fluoroguanosine
  modified_base (13)..(13): 2'-O-methyladenosine
  modified_base (14)..(14): 2'-deoxy-2'-fluorouridine
  modified_base (15)..(15): um
  modified_base (16)..(16): 2'-deoxy-2'-fluorouridine
  modified_base (17)..(17): gm
  modified_base (18)..(18): 2'-deoxy-2'-fluorouridine
  modified_base (19)..(19): gm
  modified_base (20)..(20): 2'-deoxy-2'-fluoroadenosine
  modified_base (21)..(21): 2'-O-methyladenosine
accagacaauggauuugugaa

SEQ ID NO: 5783 - RNA, 21 nt, Artificial Sequence
  siRNA sense strand against b2GPI
  modified_base (1)..(1): 2'-deoxy-2'-fluorocytidine
  modified_base (2)..(2): cm
  misc_feature (2)..(3): 5'-phosphonothioate
  modified_base (3)..(3): 2'-deoxy-2'-fluoroadenosine
  modified_base (4)..(4): gm
  modified_base (5)..(5): 2'-deoxy-2'-fluoroadenosine
  modified_base (6)..(6): cm
  modified_base (7)..(7): 2'-deoxy-2'-fluoroadenosine
  modified_base (8)..(8): 2'-O-methyladenosine
  modified_base (9)..(9): 2'-deoxy-2'-fluorouridine
  modified_base (10)..(10): gm
  modified_base (11)..(11): 2'-deoxy-2'-fluoroguanosine
  modified_base (12)..(12): 2'-deoxy-2'-fluoroadenosine
  modified_base (13)..(13): um
  modified_base (14)..(14): 2'-deoxy-2'-fluorouridine
  modified_base (15)..(15): um
  modified_base (16)..(16): 2'-deoxy-2'-fluoroguanosine
  modified_base (17)..(17): um
  modified_base (18)..(18): 2'-deoxy-2'-fluoroguanosine
  modified_base (19)..(19): 2'-O-methyladenosine
  modified_base (20)..(20): 2'-deoxy-2'-fluoroadenosine
  modified_base (21)..(21): cm
ccagacaauggauuugugaac

SEQ ID NO: 5784 - RNA, 21 nt, Artificial Sequence
  siRNA sense strand against b2GPI
  modified_base (1)..(1): 2'-deoxy-2'-fluoroadenosine
  modified_base (2)..(2): gm
  misc_feature (2)..(3): 5'-phosphonothioate
  modified_base (3)..(3): 2'-deoxy-2'-fluoroadenosine
  modified_base (4)..(4): cm
  modified_base (5)..(5): 2'-deoxy-2'-fluoroadenosine
  modified_base (6)..(6): 2'-O-methyladenosine
  modified_base (7)..(7): 2'-deoxy-2'-fluorouridine
  modified_base (8)..(8): gm
  modified_base (9)..(9): 2'-deoxy-2'-fluoroguanosine
  modified_base (10)..(10): 2'-O-methyladenosine
  modified_base (11)..(11): 2'-deoxy-2'-fluorouridine
  modified_base (12)..(12): 2'-deoxy-2'-fluorouridine
  modified_base (13)..(13): um
  modified_base (14)..(14): 2'-deoxy-2'-fluoroguanosine
  modified_base (15)..(15): um
  modified_base (16)..(16): 2'-deoxy-2'-fluoroguanosine
  modified_base (17)..(17): 2'-O-methyladenosine
  modified_base (18)..(18): 2'-deoxy-2'-fluoroadenosine
  modified_base (19)..(19): cm
  modified_base (20)..(20): 2'-deoxy-2'-fluorouridine
  modified_base (21)..(21): 2'-O-methyladenosine
agacaauggauuugugaacua

SEQ ID NO: 5785 - RNA, 21 nt, Artificial Sequence
  siRNA sense strand against b2GPI
  modified_base (1)..(1): 2'-deoxy-2'-fluoroguanosine
  modified_base (2)..(2): 2'-O-methyladenosine
  misc_feature (2)..(3): 5'-phosphonothioate
  modified_base (3)..(3): 2'-deoxy-2'-fluorocytidine
  modified_base (4)..(4): 2'-O-methyladenosine
  modified_base (5)..(5): 2'-deoxy-2'-fluoroadenosine
  modified_base (6)..(6): um
  modified_base (7)..(7): 2'-deoxy-2'-fluoroguanosine
  modified_base (8)..(8): gm
  modified_base (9)..(9): 2'-deoxy-2'-fluoroadenosine
  modified_base (10)..(10): um
  modified_base (11)..(11): 2'-deoxy-2'-fluorouridine
  modified_base (12)..(12): 2'-deoxy-2'-fluorouridine
  modified_base (13)..(13): gm
  modified_base (14)..(14): 2'-deoxy-2'-fluorouridine
  modified_base (15)..(15): gm
  modified_base (16)..(16): 2'-deoxy-2'-fluoroadenosine
  modified_base (17)..(17): 2'-O-methyladenosine
  modified_base (18)..(18): 2'-deoxy-2'-fluorocytidine
  modified_base (19)..(19): um
  modified_base (20)..(20): 2'-deoxy-2'-fluoroadenosine
  modified_base (21)..(21): um
gacaauggauuugugaacuau

SEQ ID NO: 5786 - RNA, 21 nt, Artificial Sequence
  siRNA sense strand against b2GPI
  modified_base (1)..(1): 2'-deoxy-2'-fluoroadenosine
  modified_base (2)..(2): cm
  misc_feature (2)..(3): 5'-phosphonothioate
  modified_base (3)..(3): 2'-deoxy-2'-fluoroadenosine
  modified_base (4)..(4): 2'-O-methyladenosine
  modified_base (5)..(5): 2'-deoxy-2'-fluorouridine
  modified_base (6)..(6): gm
  modified_base (7)..(7): 2'-deoxy-2'-fluoroguanosine
  modified_base (8)..(8): 2'-O-methyladenosine
  modified_base (9)..(9): 2'-deoxy-2'-fluorouridine
  modified_base (10)..(10): um
  modified_base (11)..(11): 2'-deoxy-2'-fluorouridine
  modified_base (12)..(12): 2'-deoxy-2'-fluoroguanosine
  modified_base (13)..(13): um
  modified_base (14)..(14): 2'-deoxy-2'-fluoroguanosine
  modified_base (15)..(15): 2'-O-methyladenosine
  modified_base (16)..(16): 2'-deoxy-2'-fluoroadenosine
  modified_base (17)..(17): cm
  modified_base (18)..(18): 2'-deoxy-2'-fluorouridine
  modified_base (19)..(19): 2'-O-methyladenosine
  modified_base (20)..(20): 2'-deoxy-2'-fluorouridine
  modified_base (21)..(21): cm
acaauggauuugugaacuauc

SEQ ID NO: 5787 - RNA, 21 nt, Artificial Sequence
  siRNA sense strand against b2GPI
  modified_base (1)..(1): 2'-deoxy-2'-fluoroadenosine
  modified_base (2)..(2): um
  misc_feature (2)..(3): 5'-phosphonothioate
  modified_base (3)..(3): 2'-deoxy-2'-fluoroguanosine
  modified_base (4)..(4): gm
  modified_base (5)..(5): 2'-deoxy-2'-fluoroadenosine
  modified_base (6)..(6): um
  modified_base (7)..(7): 2'-deoxy-2'-fluorouridine
  modified_base (8)..(8): um
  modified_base (9)..(9): 2'-deoxy-2'-fluoroguanosine
  modified_base (10)..(10): um
  modified_base (11)..(11): 2'-deoxy-2'-fluoroguanosine
  modified_base (12)..(12): 2'-deoxy-2'-fluoroadenosine
  modified_base (13)..(13): 2'-O-methyladenosine
  modified_base (14)..(14): 2'-deoxy-2'-fluorocytidine
  modified_base (15)..(15): um
  modified_base (16)..(16): 2'-deoxy-2'-fluoroadenosine
  modified_base (17)..(17): um
  modified_base (18)..(18): 2'-deoxy-2'-fluorocytidine
  modified_base (19)..(19): cm
  modified_base (20)..(20): 2'-deoxy-2'-fluorouridine
  modified_base (21)..(21): gm
auggauuugugaacuauccug

SEQ ID NO: 5788 - RNA, 21 nt, Artificial Sequence
  siRNA sense strand against b2GPI
  modified_base (1)..(1): 2'-deoxy-2'-fluoroguanosine
  modified_base (2)..(2): gm
  misc_feature (2)..(3): 5'-phosphonothioate
  modified_base (3)..(3): 2'-deoxy-2'-fluoroadenosine
  modified_base (4)..(4): um
  modified_base (5)..(5): 2'-deoxy-2'-fluorouridine
  modified_base (6)..(6): um
  modified_base (7)..(7): 2'-deoxy-2'-fluoroguanosine
  modified_base (8)..(8): um
  modified_base (9)..(9): 2'-deoxy-2'-fluoroguanosine
  modified_base (10)..(10): 2'-O-methyladenosine
  modified_base (11)..(11): 2'-deoxy-2'-fluoroadenosine
  modified_base (12)..(12): 2'-deoxy-2'-fluorocytidine
  modified_base (13)..(13): um
  modified_base (14)..(14): 2'-deoxy-2'-fluoroadenosine
  modified_base (15)..(15): um
  modified_base (16)..(16): 2'-deoxy-2'-fluorocytidine
  modified_base (17)..(17): cm
  modified_base (18)..(18): 2'-deoxy-2'-fluorouridine
  modified_base (19)..(19): gm
  modified_base (20)..(20): 2'-deoxy-2'-fluorocytidine
  modified_base (21)..(21): 2'-O-methyladenosine
ggauuugugaacuauccugca

SEQ ID NO: 5789 - RNA, 21 nt, Artificial Sequence
  siRNA sense strand against b2GPI
  modified_base (1)..(1): 2'-deoxy-2'-fluoroguanosine
  modified_base (2)..(2): 2'-O-methyladenosine
  misc_feature (2)..(3): 5'-phosphonothioate
  modified_base (3)..(3): 2'-deoxy-2'-fluorouridine
  modified_base (4)..(4): um
  modified_base (5)..(5): 2'-deoxy-2'-fluorouridine
  modified_base (6)..(6): gm
  modified_base (7)..(7): 2'-deoxy-2'-fluorouridine
  modified_base (8)..(8): gm
  modified_base (9)..(9): 2'-deoxy-2'-fluoroadenosine
  modified_base (10)..(10): 2'-O-methyladenosine
  modified_base (11)..(11): 2'-deoxy-2'-fluorocytidine
  modified_base (12)..(12): 2'-deoxy-2'-fluorouridine
  modified_base (13)..(13): 2'-O-methyladenosine
  modified_base (14)..(14): 2'-deoxy-2'-fluorouridine
  modified_base (15)..(15): cm
  modified_base (16)..(16): 2'-deoxy-2'-fluorocytidine
  modified_base (17)..(17): um
  modified_base (18)..(18): 2'-deoxy-2'-fluoroguanosine
  modified_base (19)..(19): cm
  modified_base (20)..(20): 2'-deoxy-2'-fluoroadenosine
  modified_base (21)..(21): 2'-O-methyladenosine
gauuugugaacuauccugcaa

SEQ ID NO: 5790 - RNA, 21 nt, Artificial Sequence
  siRNA sense strand against b2GPI
  modified_base (1)..(1): 2'-deoxy-2'-fluoroadenosine
  modified_base (2)..(2): um
  misc_feature (2)..(3): 5'-phosphonothioate
  modified_base (3)..(3): 2'-deoxy-2'-fluorouridine
  modified_base (4)..(4): um
  modified_base (5)..(5): 2'-deoxy-2'-fluoroguanosine
  modified_base (6)..(6): um
  modified_base (7)..(7): 2'-deoxy-2'-fluoroguanosine
  modified_base (8)..(8): 2'-O-methyladenosine
  modified_base (9)..(9): 2'-deoxy-2'-fluoroadenosine
  modified_base (10)..(10): cm
  modified_base (11)..(11): 2'-deoxy-2'-fluorouridine
  modified_base (12)..(12): 2'-deoxy-2'-fluoroadenosine
  modified_base (13)..(13): um
  modified_base (14)..(14): 2'-deoxy-2'-fluorocytidine
  modified_base (15)..(15): cm
  modified_base (16)..(16): 2'-deoxy-2'-fluorouridine
  modified_base (17)..(17): gm
  modified_base (18)..(18): 2'-deoxy-2'-fluorocytidine
  modified_base (19)..(19): 2'-O-methyladenosine
  modified_base (20)..(20): 2'-deoxy-2'-fluoroadenosine
  modified_base (21)..(21): 2'-O-methyladenosine
auuugugaacuauccugcaaa

SEQ ID NO: 5791 - RNA, 21 nt, Artificial Sequence
  siRNA sense strand against b2GPI
  modified_base (1)..(1): 2'-deoxy-2'-fluorouridine
  modified_base (2)..(2): um
  misc_feature (2)..(3): 5'-phosphonothioate
  modified_base (3)..(3): 2'-deoxy-2'-fluorouridine
  modified_base (4)..(4): gm
  modified_base (5)..(5): 2'-deoxy-2'-fluorouridine
  modified_base (6)..(6): gm
  modified_base (7)..(7): 2'-deoxy-2'-fluoroadenosine
  modified_base (8)..(8): 2'-O-methyladenosine
  modified_base (9)..(9): 2'-deoxy-2'-fluorocytidine
  modified_base (10)..(10): um
  modified_base (11)..(11): 2'-deoxy-2'-fluoroadenosine
  modified_base (12)..(12): 2'-deoxy-2'-fluorouridine
  modified_base (13)..(13): cm
  modified_base (14)..(14): 2'-deoxy-2'-fluorocytidine
  modified_base (15)..(15): um
  modified_base (16)..(16): 2'-deoxy-2'-fluoroguanosine
  modified_base (17)..(17): cm
  modified_base (18)..(18): 2'-deoxy-2'-fluoroadenosine
  modified_base (19)..(19): 2'-O-methyladenosine
  modified_base (20)..(20): 2'-deoxy-2'-fluoroadenosine
  modified_base (21)..(21): 2'-O-methyladenosine
uuugugaacuauccugcaaaa

SEQ ID NO: 5792 - RNA, 21 nt, Artificial Sequence
  siRNA sense strand against b2GPI
  modified_base (1)..(1): 2'-deoxy-2'-fluoroguanosine
  modified_base (2)..(2): um
  misc_feature (2)..(3): 5'-phosphonothioate
  modified_base (3)..(3): 2'-deoxy-2'-fluoroguanosine
  modified_base (4)..(4): 2'-O-methyladenosine
  modified_base (5)..(5): 2'-deoxy-2'-fluoroadenosine
  modified_base (6)..(6): cm
  modified_base (7)..(7): 2'-deoxy-2'-fluorouridine
  modified_base (8)..(8): 2'-O-methyladenosine
  modified_base (9)..(9): 2'-deoxy-2'-fluorouridine
  modified_base (10)..(10): cm
  modified_base (11)..(11): 2'-deoxy-2'-fluorocytidine
  modified_base (12)..(12): 2'-deoxy-2'-fluorouridine
  modified_base (13)..(13): gm
  modified_base (14)..(14): 2'-deoxy-2'-fluorocytidine
  modified_base (15)..(15): 2'-O-methyladenosine
  modified_base (16)..(16): 2'-deoxy-2'-fluoroadenosine
  modified_base (17)..(17): 2'-O-methyladenosine
  modified_base (18)..(18): 2'-deoxy-2'-fluoroadenosine
  modified_base (19)..(19): cm
  modified_base (20)..(20): 2'-deoxy-2'-fluorocytidine
  modified_base (21)..(21): 2'-O-methyladenosine
gugaacuauccugcaaaacca

SEQ ID NO: 5793 - RNA, 21 nt, Artificial Sequence
  siRNA sense strand against b2GPI
  modified_base (1)..(1): 2'-deoxy-2'-fluorouridine
  modified_base (2)..(2): gm
  misc_feature (2)..(3): 5'-phosphonothioate
  modified_base (3)..(3): 2'-deoxy-2'-fluoroadenosine
  modified_base (4)..(4): 2'-O-methyladenosine
  modified_base (5)..(5): 2'-deoxy-2'-fluorocytidine
  modified_base (6)..(6): um
  modified_base (7)..(7): 2'-deoxy-2'-fluoroadenosine
  modified_base (8)..(8): um
  modified_base (9)..(9): 2'-deoxy-2'-fluorocytidine
  modified_base (10)..(10): cm
  modified_base (11)..(11): 2'-deoxy-2'-fluorouridine
  modified_base (12)..(12): 2'-deoxy-2'-fluoroguanosine
  modified_base (13)..(13): cm
  modified_base (14)..(14): 2'-deoxy-2'-fluoroadenosine
  modified_base (15)..(15): 2'-O-methyladenosine
  modified_base (16)..(16): 2'-deoxy-2'-fluoroadenosine
  modified_base (17)..(17): 2'-O-methyladenosine
  modified_base (18)..(18): 2'-deoxy-2'-fluorocytidine
  modified_base (19)..(19): cm
  modified_base (20)..(20): 2'-deoxy-2'-fluoroadenosine
  modified_base (21)..(21): 2'-O-methyladenosine
ugaacuauccugcaaaaccaa

SEQ ID NO: 5794 - RNA, 21 nt, Artificial Sequence
  siRNA sense strand against b2GPI
  modified_base (1)..(1): 2'-deoxy-2'-fluoroadenosine
  modified_base (2)..(2): 2'-O-methyladenosine
  misc_feature (2)..(3): 5'-phosphonothioate
  modified_base (3)..(3): 2'-deoxy-2'-fluorocytidine
  modified_base (4)..(4): um
  modified_base (5)..(5): 2'-deoxy-2'-fluoroadenosine
  modified_base (6)..(6): um
  modified_base (7)..(7): 2'-deoxy-2'-fluorocytidine
  modified_base (8)..(8): cm
  modified_base (9)..(9): 2'-deoxy-2'-fluorouridine
  modified_base (10)..(10): gm
  modified_base (11)..(11): 2'-deoxy-2'-fluorocytidine
  modified_base (12)..(12): 2'-deoxy-2'-fluoroadenosine
  modified_base (13)..(13): 2'-O-methyladenosine
  modified_base (14)..(14): 2'-deoxy-2'-fluoroadenosine
  modified_base (15)..(15): 2'-O-methyladenosine
  modified_base (16)..(16): 2'-deoxy-2'-fluorocytidine
  modified_base (17)..(17): cm
  modified_base (18)..(18): 2'-deoxy-2'-fluoroadenosine
  modified_base (19)..(19): 2'-O-methyladenosine
  modified_base (20)..(20): 2'-deoxy-2'-fluorocytidine
  modified_base (21)..(21): 2'-O-methyladenosine
aacuauccugcaaaaccaaca

SEQ ID NO: 5795 - RNA, 21 nt, Artificial Sequence
  siRNA sense strand against b2GPI
  modified_base (1)..(1): 2'-deoxy-2'-fluoroadenosine
  modified_base (2)..(2): cm
  misc_feature (2)..(3): 5'-phosphonothioate
  modified_base (3)..(3): 2'-deoxy-2'-fluorouridine
  modified_base (4)..(4): 2'-O-methyladenosine
  modified_base (5)..(5): 2'-deoxy-2'-fluorouridine
  modified_base (6)..(6): cm
  modified_base (7)..(7): 2'-deoxy-2'-fluorocytidine
  modified_base (8)..(8): um
  modified_base (9)..(9): 2'-deoxy-2'-fluoroguanosine
  modified_base (10)..(10): cm
  modified_base (11)..(11): 2'-deoxy-2'-fluoroadenosine
  modified_base (12)..(12): 2'-deoxy-2'-fluoroadenosine
  modified_base (13)..(13): 2'-O-methyladenosine
  modified_base (14)..(14): 2'-deoxy-2'-fluoroadenosine
  modified_base (15)..(15): cm
  modified_base (16)..(16): 2'-deoxy-2'-fluorocytidine
  modified_base (17)..(17): 2'-O-methyladenosine
  modified_base (18)..(18): 2'-deoxy-2'-fluoroadenosine
  modified_base (19)..(19): cm
  modified_base (20)..(20): 2'-deoxy-2'-fluoroadenosine
  modified_base (21)..(21): cm
acuauccugcaaaaccaacac

SEQ ID NO: 5796 - RNA, 21 nt, Artificial Sequence
  siRNA sense strand against b2GPI
  modified_base (1)..(1): 2'-deoxy-2'-fluorouridine
  modified_base (2)..(2): 2'-O-methyladenosine
  misc_feature (2)..(3): 5'-phosphonothioate
  modified_base (3)..(3): 2'-deoxy-2'-fluorouridine
  modified_base (4)..(4): cm
  modified_base (5)..(5): 2'-deoxy-2'-fluorocytidine
  modified_base (6)..(6): um
  modified_base (7)..(7): 2'-deoxy-2'-fluoroguanosine
  modified_base (8)..(8): cm
  modified_base (9)..(9): 2'-deoxy-2'-fluoroadenosine
  modified_base (10)..(10): 2'-O-methyladenosine
  modified_base (11)..(11): 2'-deoxy-2'-fluoroadenosine
  modified_base (12)..(12): 2'-deoxy-2'-fluoroadenosine
  modified_base (13)..(13): cm
  modified_base (14)..(14): 2'-deoxy-2'-fluorocytidine
  modified_base (15)..(15): 2'-O-methyladenosine
  modified_base (16)..(16): 2'-deoxy-2'-fluoroadenosine
  modified_base (17)..(17): cm
  modified_base (18)..(18): 2'-deoxy-2'-fluoroadenosine
  modified_base (19)..(19): cm
  modified_base (20)..(20): 2'-deoxy-2'-fluorouridine
  modified_base (21)..(21): um
uauccugcaaaaccaacacuu

SEQ ID NO: 5797 - RNA, 21 nt, Artificial Sequence
  siRNA sense strand against b2GPI
  modified_base (1)..(1): 2'-deoxy-2'-fluoroadenosine
  modified_base (2)..(2): um
  misc_feature (2)..(3): 5'-phosphonothioate
  modified_base (3)..(3): 2'-deoxy-2'-fluorocytidine
  modified_base (4)..(4): cm
  modified_base (5)..(5): 2'-deoxy-2'-fluorouridine
  modified_base (6)..(6): gm
  modified_base (7)..(7): 2'-deoxy-2'-fluorocytidine
  modified_base (8)..(8): 2'-O-methyladenosine
  modified_base (9)..(9): 2'-deoxy-2'-fluoroadenosine
  modified_base (10)..(10): 2'-O-methyladenosine
  modified_base (11)..(11): 2'-deoxy-2'-fluoroadenosine
  modified_base (12)..(12): 2'-deoxy-2'-fluorocytidine
  modified_base (13)..(13): cm
  modified_base (14)..(14): 2'-deoxy-2'-fluoroadenosine
  modified_base (15)..(15): 2'-O-methyladenosine
  modified_base (16)..(16): 2'-deoxy-2'-fluorocytidine
  modified_base (17)..(17): 2'-O-methyladenosine
  modified_base (18)..(18): 2'-deoxy-2'-fluorocytidine
  modified_base (19)..(19): um
  modified_base (20)..(20): 2'-deoxy-2'-fluorouridine
  modified_base (21)..(21): um
auccugcaaaaccaacacuuu

SEQ ID NO: 5798 - RNA, 21 nt, Artificial Sequence
  siRNA sense strand against b2GPI
  modified_base (1)..(1): 2'-deoxy-2'-fluorouridine
  modified_base (2)..(2): cm
  misc_feature (2)..(3): 5'-phosphonothioate
  modified_base (3)..(3): 2'-deoxy-2'-fluorocytidine
  modified_base (4)..(4): um
  modified_base (5)..(5): 2'-deoxy-2'-fluoroguanosine
  modified_base (6)..(6): cm
  modified_base (7)..(7): 2'-deoxy-2'-fluoroadenosine
  modified_base (8)..(8): 2'-O-methyladenosine
  modified_base (9)..(9): 2'-deoxy-2'-fluoroadenosine
  modified_base (10)..(10): 2'-O-methyladenosine
  modified_base (11)..(11): 2'-deoxy-2'-fluorocytidine
  modified_base (12)..(12): 2'-deoxy-2'-fluorocytidine
  modified_base (13)..(13): 2'-O-methyladenosine
  modified_base (14)..(14): 2'-deoxy-2'-fluoroadenosine
  modified_base (15)..(15): cm
  modified_base (16)..(16): 2'-deoxy-2'-fluoroadenosine
  modified_base (17)..(17): cm
  modified_base (18)..(18): 2'-deoxy-2'-fluorouridine
  modified_base (19)..(19): um
  modified_base (20)..(20): 2'-deoxy-2'-fluorouridine
  modified_base (21)..(21): 2'-O-methyladenosine
uccugcaaaaccaacacuuua

SEQ ID NO: 5799 - RNA, 21 nt, Artificial Sequence
  siRNA sense strand against b2GPI
  modified_base (1)..(1): 2'-deoxy-2'-fluorocytidine
  modified_base (2)..(2): cm
  misc_feature (2)..(3): 5'-phosphonothioate
  modified_base (3)..(3): 2'-deoxy-2'-fluorouridine
  modified_base (4)..(4): gm
  modified_base (5)..(5): 2'-deoxy-2'-fluorocytidine
  modified_base (6)..(6): 2'-O-methyladenosine
  modified_base (7)..(7): 2'-deoxy-2'-fluoroadenosine
  modified_base (8)..(8): 2'-O-methyladenosine
  modified_base (9)..(9): 2'-deoxy-2'-fluoroadenosine
  modified_base (10)..(10): cm
  modified_base (11)..(11): 2'-deoxy-2'-fluorocytidine
  modified_base (12)..(12): 2'-deoxy-2'-fluoroadenosine
  modified_base (13)..(13): 2'-O-methyladenosine
  modified_base (14)..(14): 2'-deoxy-2'-fluorocytidine
  modified_base (15)..(15): 2'-O-methyladenosine
  modified_base (16)..(16): 2'-deoxy-2'-fluorocytidine
  modified_base (17)..(17): um
  modified_base (18)..(18): 2'-deoxy-2'-fluorouridine
  modified_base (19)..(19): um
  modified_base (20)..(20): 2'-deoxy-2'-fluoroadenosine
  modified_base (21)..(21): um
ccugcaaaaccaacacuuuau

SEQ ID NO: 5800 - RNA, 21 nt, Artificial Sequence
  siRNA sense strand against b2GPI
  modified_base (1)..(1): 2'-deoxy-2'-fluorocytidine
  modified_base (2)..(2): um
  misc_feature (2)..(3): 5'-phosphonothioate
  modified_base (3)..(3): 2'-deoxy-2'-fluoroguanosine
  modified_base (4)..(4): cm
  modified_base (5)..(5): 2'-deoxy-2'-fluoroadenosine
  modified_base (6)..(6): 2'-O-methyladenosine
  modified_base (7)..(7): 2'-deoxy-2'-fluoroadenosine
  modified_base (8)..(8): 2'-O-methyladenosine
  modified_base (9)..(9): 2'-deoxy-2'-fluorocytidine
  modified_base (10)..(10): cm
  modified_base (11)..(11): 2'-deoxy-2'-fluoroadenosine
  modified_base (12)..(12): 2'-deoxy-2'-fluoroadenosine
  modified_base (13)..(13): cm
  modified_base (14)..(14): 2'-deoxy-2'-fluoroadenosine
  modified_base (15)..(15): cm
  modified_base (16)..(16): 2'-deoxy-2'-fluorouridine
  modified_base (17)..(17): um
  modified_base (18)..(18): 2'-deoxy-2'-fluorouridine
  modified_base (19)..(19): 2'-O-methyladenosine
  modified_base (20)..(20): 2'-deoxy-2'-fluorouridine
  modified_base (21)..(21): um
cugcaaaaccaacacuuuauu

SEQ ID NO: 5801 - RNA, 21 nt, Artificial Sequence
  siRNA sense strand against b2GPI
  modified_base (1)..(1): 2'-deoxy-2'-fluorouridine
  modified_base (2)..(2): gm
  misc_feature (2)..(3): 5'-phosphonothioate
  modified_base (3)..(3): 2'-deoxy-2'-fluorocytidine
  modified_base (4)..(4): 2'-O-methyladenosine
  modified_base (5)..(5): 2'-deoxy-2'-fluoroadenosine
  modified_base (6)..(6): 2'-O-methyladenosine
  modified_base (7)..(7): 2'-deoxy-2'-fluoroadenosine
  modified_base (8)..(8): cm
  modified_base (9)..(9): 2'-deoxy-2'-fluorocytidine
  modified_base (10)..(10): 2'-O-methyladenosine
  modified_base (11)..(11): 2'-deoxy-2'-fluoroadenosine
  modified_base (12)..(12): 2'-deoxy-2'-fluorocytidine
  modified_base (13)..(13): 2'-O-methyladenosine
  modified_base (14)..(14): 2'-deoxy-2'-fluorocytidine
  modified_base (15)..(15): um
  modified_base (16)..(16): 2'-deoxy-2'-fluorouridine
  modified_base (17)..(17): um
  modified_base (18)..(18): 2'-deoxy-2'-fluoroadenosine
  modified_base (19)..(19): um
  modified_base (20)..(20): 2'-deoxy-2'-fluorouridine
  modified_base (21)..(21): 2'-O-methyladenosine
ugcaaaaccaacacuuuauua

SEQ ID NO: 5802 - RNA, 21 nt, Artificial Sequence
  siRNA sense strand against b2GPI
  modified_base (1)..(1): 2'-deoxy-2'-fluorocytidine
  modified_base (2)..(2): 2'-O-methyladenosine
  misc_feature (2)..(3): 5'-phosphonothioate
  modified_base (3)..(3): 2'-deoxy-2'-fluoroadenosine
  modified_base (4)..(4): 2'-O-methyladenosine
  modified_base (5)..(5): 2'-deoxy-2'-fluoroadenosine
  modified_base (6)..(6): cm
  modified_base (7)..(7): 2'-deoxy-2'-fluorocytidine
  modified_base (8)..(8): 2'-O-methyladenosine
  modified_base (9)..(9): 2'-deoxy-2'-fluoroadenosine
  modified_base (10)..(10): cm
  modified_base (11)..(11): 2'-deoxy-2'-fluoroadenosine
  modified_base (12)..(12): 2'-deoxy-2'-fluorocytidine
  modified_base (13)..(13): um
  modified_base (14)..(14): 2'-deoxy-2'-fluorouridine
  modified_base (15)..(15): um
  modified_base (16)..(16): 2'-deoxy-2'-fluoroadenosine
  modified_base (17)..(17): um
  modified_base (18)..(18): 2'-deoxy-2'-fluorouridine
  modified_base (19)..(19): 2'-O-methyladenosine
  modified_base (20)..(20): 2'-deoxy-2'-fluorocytidine
  modified_base (21)..(21): 2'-O-methyladenosine
caaaaccaacacuuuauuaca

SEQ ID NO: 5803 - RNA, 21 nt, Artificial Sequence
  siRNA sense strand against b2GPI
  modified_base (1)..(1): 2'-deoxy-2'-fluoroadenosine
  modified_base (2)..(2): 2'-O-methyladenosine
  misc_feature (2)..(3): 5'-phosphonothioate
  modified_base (3)..(3): 2'-deoxy-2'-fluoroadenosine
  modified_base (4)..(4): 2'-O-methyladenosine
  modified_base (5)..(5): 2'-deoxy-2'-fluorocytidine
  modified_base (6)..(6): cm
  modified_base (7)..(7): 2'-deoxy-2'-fluoroadenosine
  modified_base (8)..(8): 2'-O-methyladenosine
  modified_base (9)..(9): 2'-deoxy-2'-fluorocytidine
  modified_base (10)..(10): 2'-O-methyladenosine
  modified_base (11)..(11): 2'-deoxy-2'-fluorocytidine
  modified_base (12)..(12): 2'-deoxy-2'-fluorouridine
  modified_base (13)..(13): um
  modified_base (14)..(14): 2'-deoxy-2'-fluorouridine
  modified_base (15)..(15): 2'-O-methyladenosine
  modified_base (16)..(16): 2'-deoxy-2'-fluorouridine
  modified_base (17)..(17): um
  modified_base (18)..(18): 2'-deoxy-2'-fluoroadenosine
  modified_base (19)..(19): cm
  modified_base (20)..(20): 2'-deoxy-2'-fluoroadenosine
  modified_base (21)..(21): 2'-O-methyladenosine
aaaaccaacacuuuauuacaa

SEQ ID NO: 5804 - RNA, 21 nt, Artificial Sequence
  siRNA sense strand against b2GPI
  modified_base (1)..(1): 2'-deoxy-2'-fluoroadenosine
  modified_base (2)..(2): 2'-O-methyladenosine
  misc_feature (2)..(3): 5'-phosphonothioate
  modified_base (3)..(3): 2'-deoxy-2'-fluorocytidine
  modified_base (4)..(4): cm
  modified_base (5)..(5): 2'-deoxy-2'-fluoroadenosine
  modified_base (6)..(6): 2'-O-methyladenosine
  modified_base (7)..(7): 2'-deoxy-2'-fluorocytidine
  modified_base (8)..(8): 2'-O-methyladenosine
  modified_base (9)..(9): 2'-deoxy-2'-fluorocytidine
  modified_base (10)..(10): um
  modified_base (11)..(11): 2'-deoxy-2'-fluorouridine
  modified_base (12)..(12): 2'-deoxy-2'-fluorouridine
  modified_base (13)..(13): 2'-O-methyladenosine
  modified_base (14)..(14): 2'-deoxy-2'-fluorouridine
  modified_base (15)..(15): um
  modified_base (16)..(16): 2'-deoxy-2'-fluoroadenosine
  modified_base (17)..(17): cm
  modified_base (18)..(18): 2'-deoxy-2'-fluoroadenosine
  modified_base (19)..(19): 2'-O-methyladenosine
  modified_base (20)..(20): 2'-deoxy-2'-fluoroguanosine
  modified_base (21)..(21): gm
aaccaacacuuuauuacaagg

SEQ ID NO: 5805 - RNA, 21 nt, Artificial Sequence
  siRNA sense strand against b2GPI
  modified_base (1)..(1): 2'-deoxy-2'-fluorocytidine
  modified_base (2)..(2): cm
  misc_feature (2)..(3): 5'-phosphonothioate
  modified_base (3)..(3): 2'-deoxy-2'-fluoroadenosine
  modified_base (4)..(4): 2'-O-methyladenosine
  modified_base (5)..(5): 2'-deoxy-2'-fluorocytidine
  modified_base (6)..(6): 2'-O-methyladenosine
  modified_base (7)..(7): 2'-deoxy-2'-fluorocytidine
  modified_base (8)..(8): um
  modified_base (9)..(9): 2'-deoxy-2'-fluorouridine
  modified_base (10)..(10): um
  modified_base (11)..(11): 2'-deoxy-2'-fluoroadenosine
  modified_base (12)..(12): 2'-deoxy-2'-fluorouridine
  modified_base (13)..(13): um
  modified_base (14)..(14): 2'-deoxy-2'-fluoroadenosine
  modified_base (15)..(15): cm
  modified_base (16)..(16): 2'-deoxy-2'-fluoroadenosine
  modified_base (17)..(17): 2'-O-methyladenosine
  modified_base (18)..(18): 2'-deoxy-2'-fluoroguanosine
  modified_base (19)..(19): gm
  modified_base (20)..(20): 2'-deoxy-2'-fluoroadenosine
  modified_base (21)..(21): um
ccaacacuuuauuacaaggau

SEQ ID NO: 5806 - RNA, 21 nt, Artificial Sequence
  siRNA sense strand against b2GPI
  modified_base (1)..(1): 2'-deoxy-2'-fluorocytidine
  modified_base (2)..(2): 2'-O-methyladenosine
  misc_feature (2)..(3): 5'-phosphonothioate
  modified_base (3)..(3): 2'-deoxy-2'-fluoroadenosine
  modified_base (4)..(4): cm
  modified_base (5)..(5): 2'-deoxy-2'-fluoroadenosine
  modified_base (6)..(6): cm
  modified_base (7)..(7): 2'-deoxy-2'-fluorouridine
  modified_base (8)..(8): um
  modified_base (9)..(9): 2'-deoxy-2'-fluorouridine
  modified_base (10)..(10): 2'-O-methyladenosine
  modified_base (11)..(11): 2'-deoxy-2'-fluorouridine
  modified_base (12)..(12): 2'-deoxy-2'-fluorouridine
  modified_base (13)..(13): 2'-O-methyladenosine
  modified_base (14)..(14): 2'-deoxy-2'-fluorocytidine
  modified_base (15)..(15): 2'-O-methyladenosine
  modified_base (16)..(16): 2'-deoxy-2'-fluoroadenosine
  modified_base (17)..(17): gm
  modified_base (18)..(18): 2'-deoxy-2'-fluoroguanosine
  modified_base (19)..(19): 2'-O-methyladenosine
  modified_base (20)..(20): 2'-deoxy-2'-fluorouridine
  modified_base (21)..(21): 2'-O-methyladenosine
caacacuuuauuacaaggaua

SEQ ID NO: 5807 - RNA, 21 nt, Artificial Sequence
  siRNA sense strand against b2GPI
  modified_base (1)..(1): 2'-deoxy-2'-fluoroadenosine
  modified_base (2)..(2): 2'-O-methyladenosine
  misc_feature (2)..(3): 5'-phosphonothioate
  modified_base (3)..(3): 2'-deoxy-2'-fluorocytidine
  modified_base (4)..(4): 2'-O-methyladenosine
  modified_base (5)..(5): 2'-deoxy-2'-fluorocytidine
  modified_base (6)..(6): um
  modified_base (7)..(7): 2'-deoxy-2'-fluorouridine
  modified_base (8)..(8): um
  modified_base (9)..(9): 2'-deoxy-2'-fluoroadenosine
  modified_base (10)..(10): um
  modified_base (11)..(11): 2'-deoxy-2'-fluorouridine
  modified_base (12)..(12): 2'-deoxy-2'-fluoroadenosine
  modified_base (13)..(13): cm
  modified_base (14)..(14): 2'-deoxy-2'-fluoroadenosine
  modified_base (15)..(15): 2'-O-methyladenosine
  modified_base (16)..(16): 2'-deoxy-2'-fluoroguanosine
  modified_base (17)..(17): gm
  modified_base (18)..(18): 2'-deoxy-2'-fluoroadenosine
  modified_base (19)..(19): um
  modified_base (20)..(20): 2'-deoxy-2'-fluoroadenosine
  modified_base (21)..(21): 2'-O-methyladenosine
aacacuuuauuacaaggauaa

SEQ ID NO: 5808 - RNA, 21 nt, Artificial Sequence
  siRNA sense strand against b2GPI
  modified_base (1)..(1): 2'-deoxy-2'-fluorouridine
  modified_base (2)..(2): 2'-O-methyladenosine
  misc_feature (2)..(3): 5'-phosphonothioate
  modified_base (3)..(3): 2'-deoxy-2'-fluorocytidine
  modified_base (4)..(4): 2'-O-methyladenosine
  modified_base (5)..(5): 2'-deoxy-2'-fluoroadenosine
  modified_base (6)..(6): gm
  modified_base (7)..(7): 2'-deoxy-2'-fluoroguanosine
  modified_base (8)..(8): 2'-O-methyladenosine
  modified_base (9)..(9): 2'-deoxy-2'-fluorouridine
  modified_base (10)..(10): 2'-O-methyladenosine
  modified_base (11)..(11): 2'-deoxy-2'-fluoroadenosine
  modified_base (12)..(12): 2'-deoxy-2'-fluoroadenosine
  modified_base (13)..(13): gm
  modified_base (14)..(14): 2'-deoxy-2'-fluorocytidine
  modified_base (15)..(15): cm
  modified_base (16)..(16): 2'-deoxy-2'-fluoroadenosine
  modified_base (17)..(17): cm
  modified_base (18)..(18): 2'-deoxy-2'-fluoroadenosine
  modified_base (19)..(19): um
  modified_base (20)..(20): 2'-deoxy-2'-fluorouridine
  modified_base (21)..(21): um
uacaaggauaaagccacauuu

SEQ ID NO: 5809 - RNA, 21 nt, Artificial Sequence
  siRNA sense strand against b2GPI
  modified_base (1)..(1): 2'-deoxy-2'-fluorocytidine
  modified_base (2)..(2): 2'-O-methyladenosine
  misc_feature (2)..(3): 5'-phosphonothioate
  modified_base (3)..(3): 2'-deoxy-2'-fluoroadenosine
  modified_base (4)..(4): gm
  modified_base (5)..(5): 2'-deoxy-2'-fluoroguanosine
  modified_base (6)..(6): 2'-O-methyladenosine
  modified_base (7)..(7): 2'-deoxy-2'-fluorouridine
  modified_base (8)..(8): 2'-O-methyladenosine
  modified_base (9)..(9): 2'-deoxy-2'-fluoroadenosine
  modified_base (10)..(10): 2'-O-methyladenosine
  modified_base (11)..(11): 2'-deoxy-2'-fluoroguanosine
  modified_base (12)..(12): 2'-deoxy-2'-fluorocytidine
  modified_base (13)..(13): cm
  modified_base (14)..(14): 2'-deoxy-2'-fluoroadenosine
  modified_base (15)..(15): cm
  modified_base (16)..(16): 2'-deoxy-2'-fluoroadenosine
  modified_base (17)..(17): um
  modified_base (18)..(18): 2'-deoxy-2'-fluorouridine
  modified_base (19)..(19): um
  modified_base (20)..(20): 2'-deoxy-2'-fluoroguanosine
  modified_base (21)..(21): gm
caaggauaaagccacauuugg

SEQ ID NO: 5810 - RNA, 21 nt, Artificial Sequence
  siRNA sense strand against b2GPI
  modified_base (1)..(1): 2'-deoxy-2'-fluoroadenosine
  modified_base (2)..(2): gm
  misc_feature (2)..(3): 5'-phosphonothioate
  modified_base (3)..(3): 2'-deoxy-2'-fluoroguanosine
  modified_base (4)..(4): 2'-O-methyladenosine
  modified_base (5)..(5): 2'-deoxy-2'-fluorouridine
  modified_base (6)..(6): 2'-O-methyladenosine
  modified_base (7)..(7): 2'-deoxy-2'-fluoroadenosine
  modified_base (8)..(8): 2'-O-methyladenosine
  modified_base (9)..(9): 2'-deoxy-2'-fluoroguanosine
  modified_base (10)..(10): cm
  modified_base (11)..(11): 2'-deoxy-2'-fluorocytidine
  modified_base (12)..(12): 2'-deoxy-2'-fluoroadenosine
  modified_base (13)..(13): cm
  modified_base (14)..(14): 2'-deoxy-2'-fluoroadenosine
  modified_base (15)..(15): um
  modified_base (16)..(16): 2'-deoxy-2'-fluorouridine
  modified_base (17)..(17): um
  modified_base (18)..(18): 2'-deoxy-2'-fluoroguanosine
  modified_base (19)..(19): gm
  modified_base (20)..(20): 2'-deoxy-2'-fluorocytidine
  modified_base (21)..(21): um
aggauaaagccacauuuggcu

SEQ ID NO: 5811 - RNA, 21 nt, Artificial Sequence
  siRNA sense strand against b2GPI
  modified_base (1)..(1): 2'-deoxy-2'-fluorouridine
  modified_base (2)..(2): 2'-O-methyladenosine
  misc_feature (2)..(3): 5'-phosphonothioate
  modified_base (3)..(3): 2'-deoxy-2'-fluoroadenosine
  modified_base (4)..(4): 2'-O-methyladenosine
  modified_base (5)..(5): 2'-deoxy-2'-fluoroguanosine
  modified_base (6)..(6): cm
  modified_base (7)..(7): 2'-deoxy-2'-fluorocytidine
  modified_base (8)..(8): 2'-O-methyladenosine
  modified_base (9)..(9): 2'-deoxy-2'-fluorocytidine
  modified_base (10)..(10): 2'-O-methyladenosine
  modified_base (11)..(11): 2'-deoxy-2'-fluorouridine
  modified_base (12)..(12): 2'-deoxy-2'-fluorouridine
  modified_base (13)..(13): um
  modified_base (14)..(14): 2'-deoxy-2'-fluoroguanosine
  modified_base (15)..(15): gm
  modified_base (16)..(16): 2'-deoxy-2'-fluorocytidine
  modified_base (17)..(17): um
  modified_base (18)..(18): 2'-deoxy-2'-fluoroguanosine
  modified_base (19)..(19): cm
  modified_base (20)..(20): 2'-deoxy-2'-fluorocytidine
  modified_base (21)..(21): 2'-O-methyladenosine
uaaagccacauuuggcugcca

SEQ ID NO: 5812 - RNA, 21 nt, Artificial Sequence
  siRNA sense strand against b2GPI
  modified_base (1)..(1): 2'-deoxy-2'-fluoroadenosine
  modified_base (2)..(2): 2'-O-methyladenosine
  misc_feature (2)..(3): 5'-phosphonothioate
  modified_base (3)..(3): 2'-deoxy-2'-fluoroadenosine
  modified_base (4)..(4): gm
  modified_base (5)..(5): 2'-deoxy-2'-fluorocytidine
  modified_base (6)..(6): cm
  modified_base (7)..(7): 2'-deoxy-2'-fluoroadenosine
  modified_base (8)..(8): cm
  modified_base (9)..(9): 2'-deoxy-2'-fluoroadenosine
  modified_base (10)..(10): um
  modified_base (11)..(11): 2'-deoxy-2'-fluorouridine
  modified_base (12)..(12): 2'-deoxy-2'-fluorouridine
  modified_base (13)..(13): gm
  modified_base (14)..(14): 2'-deoxy-2'-fluoroguanosine
  modified_base (15)..(15): cm
  modified_base (16)..(16): 2'-deoxy-2'-fluorouridine
  modified_base (17)..(17): gm
  modified_base (18)..(18): 2'-deoxy-2'-fluorocytidine
  modified_base (19)..(19): cm
  modified_base (20)..(20): 2'-deoxy-2'-fluoroadenosine
  modified_base (21)..(21): um
aaagccacauuuggcugccau

SEQ ID NO: 5813 - RNA, 21 nt, Artificial Sequence
  siRNA sense strand against b2GPI
  modified_base (1)..(1): 2'-deoxy-2'-fluoroadenosine
  modified_base (2)..(2): 2'-O-methyladenosine
  misc_feature (2)..(3): 5'-phosphonothioate
  modified_base (3)..(3): 2'-deoxy-2'-fluoroguanosine
  modified_base (4)..(4): cm
  modified_base (5)..(5): 2'-deoxy-2'-fluorocytidine
  modified_base (6)..(6): 2'-O-methyladenosine
  modified_base (7)..(7): 2'-deoxy-2'-fluorocytidine
  modified_base (8)..(8): 2'-O-methyladenosine
  modified_base (9)..(9): 2'-deoxy-2'-fluorouridine
  modified_base (10)..(10): um
  modified_base (11)..(11): 2'-deoxy-2'-fluorouridine
  modified_base (12)..(12): 2'-deoxy-2'-fluoroguanosine
  modified_base (13)..(13): gm
  modified_base (14)..(14): 2'-deoxy-2'-fluorocytidine
  modified_base (15)..(15): um
  modified_base (16)..(16): 2'-deoxy-2'-fluoroguanosine
  modified_base (17)..(17): cm
  modified_base (18)..(18): 2'-deoxy-2'-fluorocytidine
  modified_base (19)..(19): 2'-O-methyladenosine
  modified_base (20)..(20): 2'-deoxy-2'-fluorouridine
  modified_base (21)..(21): gm
aagccacauuuggcugccaug

SEQ ID NO: 5814 - RNA, 21 nt, Artificial Sequence
  siRNA sense strand against b2GPI
  modified_base (1)..(1): 2'-deoxy-2'-fluoroadenosine
  modified_base (2)..(2): gm
  misc_feature (2)..(3): 5'-phosphonothioate
  modified_base (3)..(3): 2'-deoxy-2'-fluorocytidine
  modified_base (4)..(4): cm
  modified_base (5)..(5): 2'-deoxy-2'-fluoroadenosine
  modified_base (6)..(6): cm
  modified_base (7)..(7): 2'-deoxy-2'-fluoroadenosine
  modified_base (8)..(8): um
  modified_base (9)..(9): 2'-deoxy-2'-fluorouridine
  modified_base (10)..(10): um
  modified_base (11)..(11): 2'-deoxy-2'-fluoroguanosine
  modified_base (12)..(12): 2'-deoxy-2'-fluoroguanosine
  modified_base (13)..(13): cm
  modified_base (14)..(14): 2'-deoxy-2'-fluorouridine
  modified_base (15)..(15): gm
  modified_base (16)..(16): 2'-deoxy-2'-fluorocytidine
  modified_base (17)..(17): cm
  modified_base (18)..(18): 2'-deoxy-2'-fluoroadenosine
  modified_base (19)..(19): um
  modified_base (20)..(20): 2'-deoxy-2'-fluoroguanosine
  modified_base (21)..(21): 2'-O-methyladenosine
agccacauuuggcugccauga

SEQ ID NO: 5815 - RNA, 21 nt, Artificial Sequence
  siRNA sense strand against b2GPI
  modified_base (1)..(1): 2'-deoxy-2'-fluoroguanosine
  modified_base (2)..(2): cm
  misc_feature (2)..(3): 5'-phosphonothioate
  modified_base (3)..(3): 2'-deoxy-2'-fluorocytidine
  modified_base (4)..(4): 2'-O-methyladenosine
  modified_base (5)..(5): 2'-deoxy-2'-fluorocytidine
  modified_base (6)..(6): 2'-O-methyladenosine
  modified_base (7)..(7): 2'-deoxy-2'-fluorouridine
  modified_base (8)..(8): um
  modified_base (9)..(9): 2'-deoxy-2'-fluorouridine
  modified_base (10)..(10): gm
  modified_base (11)..(11): 2'-deoxy-2'-fluoroguanosine
  modified_base (12)..(12): 2'-deoxy-2'-fluorocytidine
  modified_base (13)..(13): um
  modified_base (14)..(14): 2'-deoxy-2'-fluoroguanosine
  modified_base (15)..(15): cm
  modified_base (16)..(16): 2'-deoxy-2'-fluorocytidine
  modified_base (17)..(17): 2'-O-methyladenosine
  modified_base (18)..(18): 2'-deoxy-2'-fluorouridine
  modified_base (19)..(19): gm
  modified_base (20)..(20): 2'-deoxy-2'-fluoroadenosine
  modified_base (21)..(21): um
gccacauuuggcugccaugau

SEQ ID NO: 5816 - RNA, 21 nt, Artificial Sequence
  siRNA sense strand against b2GPI
  modified_base (1)..(1): 2'-deoxy-2'-fluorocytidine
  modified_base (2)..(2): cm
  misc_feature (2)..(3): 5'-phosphonothioate
  modified_base (3)..(3): 2'-deoxy-2'-fluoroadenosine
  modified_base (4)..(4): cm
  modified_base (5)..(5): 2'-deoxy-2'-fluoroadenosine
  modified_base (6)..(6): um
  modified_base (7)..(7): 2'-deoxy-2'-fluorouridine
  modified_base (8)..(8): um
  modified_base (9)..(9): 2'-deoxy-2'-fluoroguanosine
  modified_base (10)..(10): gm
  modified_base (11)..(11): 2'-deoxy-2'-fluorocytidine
  modified_base (12)..(12): 2'-deoxy-2'-fluorouridine
  modified_base (13)..(13): gm
  modified_base (14)..(14): 2'-deoxy-2'-fluorocytidine
  modified_base (15)..(15): cm
  modified_base (16)..(16): 2'-deoxy-2'-fluoroadenosine
  modified_base (17)..(17): um
  modified_base (18)..(18): 2'-deoxy-2'-fluoroguanosine
  modified_base (19)..(19): 2'-O-methyladenosine
  modified_base (20)..(20): 2'-deoxy-2'-fluorouridine
  modified_base (21)..(21): gm
ccacauuuggcugccaugaug

SEQ ID NO: 5817 - RNA, 21 nt, Artificial Sequence
  siRNA sense strand against b2GPI
  modified_base (1)..(1): 2'-deoxy-2'-fluorocytidine
  modified_base (2)..(2): 2'-O-methyladenosine
  misc_feature (2)..(3): 5'-phosphonothioate
  modified_base (3)..(3): 2'-deoxy-2'-fluorocytidine
  modified_base (4)..(4): 2'-O-methyladenosine
  modified_base (5)..(5): 2'-deoxy-2'-fluorouridine
  modified_base (6)..(6): um
  modified_base (7)..(7): 2'-deoxy-2'-fluorouridine
  modified_base (8)..(8): gm
  modified_base (9)..(9): 2'-deoxy-2'-fluoroguanosine
  modified_base (10)..(10): cm
  modified_base (11)..(11): 2'-deoxy-2'-fluorouridine
  modified_base (12)..(12): 2'-deoxy-2'-fluoroguanosine
  modified_base (13)..(13): cm
  modified_base (14)..(14): 2'-deoxy-2'-fluorocytidine
  modified_base (15)..(15): 2'-O-methyladenosine
  modified_base (16)..(16): 2'-deoxy-2'-fluorouridine
  modified_base (17)..(17): gm
  modified_base (18)..(18): 2'-deoxy-2'-fluoroadenosine
  modified_base (19)..(19): um
  modified_base (20)..(20): 2'-deoxy-2'-fluoroguanosine
  modified_base (21)..(21): gm
cacauuuggcugccaugaugg

SEQ ID NO: 5818 - RNA, 21 nt, Artificial Sequence
  siRNA sense strand against b2GPI
  modified_base (1)..(1): 2'-deoxy-2'-fluoroadenosine
  modified_base (2)..(2): cm
  misc_feature (2)..(3): 5'-phosphonothioate
  modified_base (3)..(3): 2'-deoxy-2'-fluoroadenosine
  modified_base (4)..(4): um
  modified_base (5)..(5): 2'-deoxy-2'-fluorouridine
  modified_base (6)..(6): um
  modified_base (7)..(7): 2'-deoxy-2'-fluoroguanosine
  modified_base (8)..(8): gm
  modified_base (9)..(9): 2'-deoxy-2'-fluorocytidine
  modified_base (10)..(10): um
  modified_base (11)..(11): 2'-deoxy-2'-fluoroguanosine
  modified_base (12)..(12): 2'-deoxy-2'-fluorocytidine
  modified_base (13)..(13): cm
  modified_base (14)..(14): 2'-deoxy-2'-fluoroadenosine
  modified_base (15)..(15): um
  modified_base (16)..(16): 2'-deoxy-2'-fluoroguanosine
  modified_base (17)..(17): 2'-O-methyladenosine
  modified_base (18)..(18): 2'-deoxy-2'-fluorouridine
  modified_base (19)..(19): gm
  modified_base (20)..(20): 2'-deoxy-2'-fluoroguanosine
  modified_base (21)..(21): 2'-O-methyladenosine
acauuuggcugccaugaugga

SEQ ID NO: 5819 - RNA, 21 nt, Artificial Sequence
  siRNA sense strand against b2GPI
  modified_base (1)..(1): 2'-deoxy-2'-fluorouridine
  modified_base (2)..(2): um
  misc_feature (2)..(3): 5'-phosphonothioate
  modified_base (3)..(3): 2'-deoxy-2'-fluorouridine
  modified_base (4)..(4): gm
  modified_base (5)..(5): 2'-deoxy-2'-fluoroguanosine
  modified_base (6)..(6): cm
  modified_base (7)..(7): 2'-deoxy-2'-fluorouridine
  modified_base (8)..(8): gm
  modified_base (9)..(9): 2'-deoxy-2'-fluorocytidine
  modified_base (10)..(10): cm
  modified_base (11)..(11): 2'-deoxy-2'-fluoroadenosine
  modified_base (12)..(12): 2'-deoxy-2'-fluorouridine
  modified_base (13)..(13): gm
  modified_base (14)..(14): 2'-deoxy-2'-fluoroadenosine
  modified_base (15)..(15): um
  modified_base (16)..(16): 2'-deoxy-2'-fluoroguanosine
  modified_base (17)..(17): gm
  modified_base (18)..(18): 2'-deoxy-2'-fluoroadenosine
  modified_base (19)..(19): um
  modified_base (20)..(20): 2'-deoxy-2'-fluoroadenosine
  modified_base (21)..(21): um
uuuggcugccaugauggauau

SEQ ID NO: 5820 - RNA, 21 nt, Artificial Sequence
  siRNA sense strand against b2GPI
  modified_base (1)..(1): 2'-deoxy-2'-fluorouridine
  modified_base (2)..(2): um
  misc_feature (2)..(3): 5'-phosphonothioate
  modified_base (3)..(3): 2'-deoxy-2'-fluoroguanosine
  modified_base (4)..(4): gm
  modified_base (5)..(5): 2'-deoxy-2'-fluorocytidine
  modified_base (6)..(6): um
  modified_base (7)..(7): 2'-deoxy-2'-fluoroguanosine
  modified_base (8)..(8): cm
  modified_base (9)..(9): 2'-deoxy-2'-fluorocytidine
  modified_base (10)..(10): 2'-O-methyladenosine
  modified_base (11)..(11): 2'-deoxy-2'-fluorouridine
  modified_base (12)..(12): 2'-deoxy-2'-fluoroguanosine
  modified_base (13)..(13): 2'-O-methyladenosine
  modified_base (14)..(14): 2'-deoxy-2'-fluorouridine
  modified_base (15)..(15): gm
  modified_base (16)..(16): 2'-deoxy-2'-fluoroguanosine
  modified_base (17)..(17): 2'-O-methyladenosine
  modified_base (18)..(18): 2'-deoxy-2'-fluorouridine
  modified_base (19)..(19): 2'-O-methyladenosine
  modified_base (20)..(20): 2'-deoxy-2'-fluorouridine
  modified_base (21)..(21): um
uuggcugccaugauggauauu

SEQ ID NO: 5821 - RNA, 21 nt, Artificial Sequence
  siRNA sense strand against b2GPI
  modified_base (1)..(1): 2'-deoxy-2'-fluoroguanosine
  modified_base (2)..(2): gm
  misc_feature (2)..(3): 5'-phosphonothioate
  modified_base (3)..(3): 2'-deoxy-2'-fluorocytidine
  modified_base (4)..(4): um
  modified_base (5)..(5): 2'-deoxy-2'-fluoroguanosine
  modified_base (6)..(6): cm
  modified_base (7)..(7): 2'-deoxy-2'-fluorocytidine
  modified_base (8)..(8): 2'-O-methyladenosine
  modified_base (9)..(9): 2'-deoxy-2'-fluorouridine
  modified_base (10)..(10): gm
  modified_base (11)..(11): 2'-deoxy-2'-fluoroadenosine
  modified_base (12)..(12): 2'-deoxy-2'-fluorouridine
  modified_base (13)..(13): gm
  modified_base (14)..(14): 2'-deoxy-2'-fluoroguanosine
  modified_base (15)..(15): 2'-O-methyladenosine
  modified_base (16)..(16): 2'-deoxy-2'-fluorouridine
  modified_base (17)..(17): 2'-O-methyladenosine
  modified_base (18)..(18): 2'-deoxy-2'-fluorouridine
  modified_base (19)..(19): um
  modified_base (20)..(20): 2'-deoxy-2'-fluorocytidine
  modified_base (21)..(21): um
ggcugccaugauggauauucu

SEQ ID NO: 5822 - RNA, 21 nt, Artificial Sequence
  siRNA sense strand against b2GPI
  modified_base (1)..(1): 2'-deoxy-2'-fluoroguanosine
  modified_base (2)..(2): cm
  misc_feature (2)..(3): 5'-phosphonothioate
  modified_base (3)..(3): 2'-deoxy-2'-fluorouridine
  modified_base (4)..(4): gm
  modified_base (5)..(5): 2'-deoxy-2'-fluorocytidine
  modified_base (6)..(6): cm
  modified_base (7)..(7): 2'-deoxy-2'-fluoroadenosine
  modified_base (8)..(8): um
  modified_base (9)..(9): 2'-deoxy-2'-fluoroguanosine
  modified_base (10)..(10): 2'-O-methyladenosine
  modified_base (11)..(11): 2'-deoxy-2'-fluorouridine
  modified_base (12)..(12): 2'-deoxy-2'-fluoroguanosine
  modified_base (13)..(13): gm
  modified_base (14)..(14): 2'-deoxy-2'-fluoroadenosine
  modified_base (15)..(15): um
  modified_base (16)..(16): 2'-deoxy-2'-fluoroadenosine
  modified_base (17)..(17): um
  modified_base (18)..(18): 2'-deoxy-2'-fluorouridine
  modified_base (19)..(19): cm
  modified_base (20)..(20): 2'-deoxy-2'-fluorouridine
  modified_base (21)..(21): cm
gcugccaugauggauauucuc

SEQ ID NO: 5823 - RNA, 21 nt, Artificial Sequence
  siRNA sense strand against b2GPI
  modified_base (1)..(1): 2'-deoxy-2'-fluorouridine
  modified_base (2)..(2): gm
  misc_feature (2)..(3): 5'-phosphonothioate
  modified_base (3)..(3): 2'-deoxy-2'-fluorocytidine
  modified_base (4)..(4): cm
  modified_base (5)..(5): 2'-deoxy-2'-fluoroadenosine
  modified_base (6)..(6): um
  modified_base (7)..(7): 2'-deoxy-2'-fluoroguanosine
  modified_base (8)..(8): 2'-O-methyladenosine
  modified_base (9)..(9): 2'-deoxy-2'-fluorouridine
  modified_base (10)..(10): gm
  modified_base (11)..(11): 2'-deoxy-2'-fluoroguanosine
  modified_base (12)..(12): 2'-deoxy-2'-fluoroadenosine
  modified_base (13)..(13): um
  modified_base (14)..(14): 2'-deoxy-2'-fluoroadenosine
  modified_base (15)..(15): um
  modified_base (16)..(16): 2'-deoxy-2'-fluorouridine
  modified_base (17)..(17): cm
  modified_base (18)..(18): 2'-deoxy-2'-fluorouridine
  modified_base (19)..(19): cm
  modified_base (20)..(20): 2'-deoxy-2'-fluorouridine
  modified_base (21)..(21): gm
ugccaugauggauauucucug

SEQ ID NO: 5824 - RNA, 21 nt, Artificial Sequence
  siRNA sense strand against b2GPI
  modified_base (1)..(1): 2'-deoxy-2'-fluoroguanosine
  modified_base (2)..(2): cm
  misc_feature (2)..(3): 5'-phosphonothioate
  modified_base (3)..(3): 2'-deoxy-2'-fluorocytidine
  modified_base (4)..(4): 2'-O-methyladenosine
  modified_base (5)..(5): 2'-deoxy-2'-fluorouridine
  modified_base (6)..(6): gm
  modified_base (7)..(7): 2'-deoxy-2'-fluoroadenosine
  modified_base (8)..(8): um
  modified_base (9)..(9): 2'-deoxy-2'-fluoroguanosine
  modified_base (10)..(10): gm
  modified_base (11)..(11): 2'-deoxy-2'-fluoroadenosine
  modified_base (12)..(12): 2'-deoxy-2'-fluorouridine
  modified_base (13)..(13): 2'-O-methyladenosine
  modified_base (14)..(14): 2'-deoxy-2'-fluorouridine
  modified_base (15)..(15): um
  modified_base (16)..(16): 2'-deoxy-2'-fluorocytidine
  modified_base (17)..(17): um
  modified_base (18)..(18): 2'-deoxy-2'-fluorocytidine
  modified_base (19)..(19): um
  modified_base (20)..(20): 2'-deoxy-2'-fluoroguanosine
  modified_base (21)..(21): gm
gccaugauggauauucucugg

SEQ ID NO: 5825 - RNA, 21 nt, Artificial Sequence
  siRNA sense strand against b2GPI
  modified_base (1)..(1): 2'-deoxy-2'-fluorocytidine
  modified_base (2)..(2): 2'-O-methyladenosine
  misc_feature (2)..(3): 5'-phosphonothioate
  modified_base (3)..(3): 2'-deoxy-2'-fluorouridine
  modified_base (4)..(4): gm
  modified_base (5)..(5): 2'-deoxy-2'-fluoroadenosine
  modified_base (6)..(6): um
  modified_base (7)..(7): 2'-deoxy-2'-fluoroguanosine
  modified_base (8)..(8): gm
  modified_base (9)..(9): 2'-deoxy-2'-fluoroadenosine
  modified_base (10)..(10): um
  modified_base (11)..(11): 2'-deoxy-2'-fluoroadenosine
  modified_base (12)..(12): 2'-deoxy-2'-fluorouridine
  modified_base (13)..(13): um
  modified_base (14)..(14): 2'-deoxy-2'-fluorocytidine
  modified_base (15)..(15): um
  modified_base (16)..(16): 2'-deoxy-2'-fluorocytidine
  modified_base (17)..(17): um
  modified_base (18)..(18): 2'-deoxy-2'-fluoroguanosine
  modified_base (19)..(19): gm
  modified_base (20)..(20): 2'-deoxy-2'-fluoroadenosine
  modified_base (21)..(21): um
caugauggauauucucuggau

SEQ ID NO: 5826 - RNA, 21 nt, Artificial Sequence
  siRNA sense strand against b2GPI
  modified_base (1)..(1): 2'-deoxy-2'-fluoroadenosine
  modified_base (2)..(2): um
  misc_feature (2)..(3): 5'-phosphonothioate
  modified_base (3)..(3): 2'-deoxy-2'-fluoroguanosine
  modified_base (4)..(4): 2'-O-methyladenosine
  modified_base (5)..(5): 2'-deoxy-2'-fluorouridine
  modified_base (6)..(6): gm
  modified_base (7)..(7): 2'-deoxy-2'-fluoroguanosine
  modified_base (8)..(8): 2'-O-methyladenosine
  modified_base (9)..(9): 2'-deoxy-2'-fluorouridine
  modified_base (10)..(10): 2'-O-methyladenosine
  modified_base (11)..(11): 2'-deoxy-2'-fluorouridine
  modified_base (12)..(12): 2'-deoxy-2'-fluorouridine
  modified_base (13)..(13): cm
  modified_base (14)..(14): 2'-deoxy-2'-fluorouridine
  modified_base (15)..(15): cm
  modified_base (16)..(16): 2'-deoxy-2'-fluorouridine
  modified_base (17)..(17): gm
  modified_base (18)..(18): 2'-deoxy-2'-fluoroguanosine
  modified_base (19)..(19): 2'-O-methyladenosine
  modified_base (20)..(20): 2'-deoxy-2'-fluorouridine
  modified_base (21)..(21): gm
augauggauauucucuggaug

SEQ ID NO: 5827 - RNA, 21 nt, Artificial Sequence
  siRNA sense strand against b2GPI
  modified_base (1)..(1): 2'-deoxy-2'-fluoroadenosine
  modified_base (2)..(2): um
  misc_feature (2)..(3): 5'-phosphonothioate
  modified_base (3)..(3): 2'-deoxy-2'-fluoroguanosine
  modified_base (4)..(4): gm
  modified_base (5)..(5): 2'-deoxy-2'-fluoroadenosine
  modified_base (6)..(6): um
  modified_base (7)..(7): 2'-deoxy-2'-fluoroadenosine
  modified_base (8)..(8): um
  modified_base (9)..(9): 2'-deoxy-2'-fluorouridine
  modified_base (10)..(10): cm
  modified_base (11)..(11): 2'-deoxy-2'-fluorouridine
  modified_base (12)..(12): 2'-deoxy-2'-fluorocytidine
  modified_base (13)..(13): um
  modified_base (14)..(14): 2'-deoxy-2'-fluoroguanosine
  modified_base (15)..(15): gm
  modified_base (16)..(16): 2'-deoxy-2'-fluoroadenosine
  modified_base (17)..(17): um
  modified_base (18)..(18): 2'-deoxy-2'-fluoroguanosine
  modified_base (19)..(19): gm
  modified_base (20)..(20): 2'-deoxy-2'-fluorocytidine
  modified_base (21)..(21): cm
auggauauucucuggauggcc

SEQ ID NO: 5828 - RNA, 21 nt, Artificial Sequence
  siRNA sense strand against b2GPI
  modified_base (1)..(1): 2'-deoxy-2'-fluorouridine
  modified_base (2)..(2): 2'-O-methyladenosine
  misc_feature (2)..(3): 5'-phosphonothioate
  modified_base (3)..(3): 2'-deoxy-2'-fluorouridine
  modified_base (4)..(4): um
  modified_base (5)..(5): 2'-deoxy-2'-fluorocytidine
  modified_base (6)..(6): um
  modified_base (7)..(7): 2'-deoxy-2'-fluorocytidine
  modified_base (8)..(8): um
  modified_base (9)..(9): 2'-deoxy-2'-fluoroguanosine
  modified_base (10)..(10): gm
  modified_base (11)..(11): 2'-deoxy-2'-fluoroadenosine
  modified_base (12)..(12): 2'-deoxy-2'-fluorouridine
  modified_base (13)..(13): gm
  modified_base (14)..(14): 2'-deoxy-2'-fluoroguanosine
  modified_base (15)..(15): cm
  modified_base (16)..(16): 2'-deoxy-2'-fluorocytidine
  modified_base (17)..(17): cm
  modified_base (18)..(18): 2'-deoxy-2'-fluoroguanosine
  modified_base (19)..(19): gm
  modified_base (20)..(20): 2'-deoxy-2'-fluoroadenosine
  modified_base (21)..(21): 2'-O-methyladenosine
uauucucuggauggcccggaa

SEQ ID NO: 5829 - RNA, 21 nt, Artificial Sequence
  siRNA sense strand against b2GPI
  modified_base (1)..(1): 2'-deoxy-2'-fluorouridine
  modified_base (2)..(2): um
  misc_feature (2)..(3): 5'-phosphonothioate
  modified_base (3)..(3): 2'-deoxy-2'-fluorocytidine
  modified_base (4)..(4): um
  modified_base (5)..(5): 2'-deoxy-2'-fluorocytidine
  modified_base (6)..(6): um
  modified_base (7)..(7): 2'-deoxy-2'-fluoroguanosine
  modified_base (8)..(8): gm
  modified_base (9)..(9): 2'-deoxy-2'-fluoroadenosine
  modified_base (10)..(10): um
  modified_base (11)..(11): 2'-deoxy-2'-fluoroguanosine
  modified_base (12)..(12): 2'-deoxy-2'-fluoroguanosine
  modified_base (13)..(13): cm
  modified_base (14)..(14): 2'-deoxy-2'-fluorocytidine
  modified_base (15)..(15): cm
  modified_base (16)..(16): 2'-deoxy-2'-fluoroguanosine
  modified_base (17)..(17): gm
  modified_base (18)..(18): 2'-deoxy-2'-fluoroadenosine
  modified_base (19)..(19): 2'-O-methyladenosine
  modified_base (20)..(20): 2'-deoxy-2'-fluoroguanosine
  modified_base (21)..(21): 2'-O-methyladenosine
uucucuggauggcccggaaga

SEQ ID NO: 5830 - RNA, 21 nt, Artificial Sequence
  siRNA sense strand against b2GPI
  modified_base (1)..(1): 2'-deoxy-2'-fluorouridine
  modified_base (2)..(2): cm
  misc_feature (2)..(3): 5'-phosphonothioate
  modified_base (3)..(3): 2'-deoxy-2'-fluorouridine
  modified_base (4)..(4): cm
  modified_base (5)..(5): 2'-deoxy-2'-fluorouridine
  modified_base (6)..(6): gm
  modified_base (7)..(7): 2'-deoxy-2'-fluoroguanosine
  modified_base (8)..(8): 2'-O-methyladenosine
  modified_base (9)..(9): 2'-deoxy-2'-fluorouridine
  modified_base (10)..(10): gm
  modified_base (11)..(11): 2'-deoxy-2'-fluoroguanosine
  modified_base (12)..(12): 2'-deoxy-2'-fluorocytidine
  modified_base (13)..(13): cm
  modified_base (14)..(14): 2'-deoxy-2'-fluorocytidine
  modified_base (15)..(15): gm
  modified_base (16)..(16): 2'-deoxy-2'-fluoroguanosine
  modified_base (17)..(17): 2'-O-methyladenosine
  modified_base (18)..(18): 2'-deoxy-2'-fluoroadenosine
  modified_base (19)..(19): gm
  modified_base (20)..(20): 2'-deoxy-2'-fluoroadenosine
  modified_base (21)..(21): 2'-O-methyladenosine
ucucuggauggcccggaagaa

SEQ ID NO: 5831 - RNA, 21 nt, Artificial Sequence
  siRNA sense strand against b2GPI
  modified_base (1)..(1): 2'-deoxy-2'-fluorocytidine
  modified_base (2)..(2): um
  misc_feature (2)..(3): 5'-phosphonothioate
  modified_base (3)..(3): 2'-deoxy-2'-fluorocytidine
  modified_base (4)..(4): um
  modified_base (5)..(5): 2'-deoxy-2'-fluoroguanosine
  modified_base (6)..(6): gm
  modified_base (7)..(7): 2'-deoxy-2'-fluoroadenosine
  modified_base (8)..(8): um
  modified_base (9)..(9): 2'-deoxy-2'-fluoroguanosine
  modified_base (10)..(10): gm
  modified_base (11)..(11): 2'-deoxy-2'-fluorocytidine
  modified_base (12)..(12): 2'-deoxy-2'-fluorocytidine
  modified_base (13)..(13): cm
  modified_base (14)..(14): 2'-deoxy-2'-fluoroguanosine
  modified_base (15)..(15): gm
  modified_base (16)..(16): 2'-deoxy-2'-fluoroadenosine
  modified_base (17)..(17): 2'-O-methyladenosine
  modified_base (18)..(18): 2'-deoxy-2'-fluoroguanosine
  modified_base (19)..(19): 2'-O-methyladenosine
  modified_base (20)..(20): 2'-deoxy-2'-fluoroadenosine
  modified_base (21)..(21): 2'-O-methyladenosine
cucuggauggcccggaagaaa

SEQ ID NO: 5832 - RNA, 21 nt, Artificial Sequence
  siRNA sense strand against b2GPI
  modified_base (1)..(1): 2'-deoxy-2'-fluorouridine
  modified_base (2)..(2): cm
  misc_feature (2)..(3): 5'-phosphonothioate
  modified_base (3)..(3): 2'-deoxy-2'-fluorouridine
  modified_base (4)..(4): gm
  modified_base (5)..(5): 2'-deoxy-2'-fluoroguanosine
  modified_base (6)..(6): 2'-O-methyladenosine
  modified_base (7)..(7): 2'-deoxy-2'-fluorouridine
  modified_base (8)..(8): gm
  modified_base (9)..(9): 2'-deoxy-2'-fluoroguanosine
  modified_base (10)..(10): cm
  modified_base (11)..(11): 2'-deoxy-2'-fluorocytidine
  modified_base (12)..(12): 2'-deoxy-2'-fluorocytidine
  modified_base (13)..(13): gm
  modified_base (14)..(14): 2'-deoxy-2'-fluoroguanosine
  modified_base (15)..(15): 2'-O-methyladenosine
  modified_base (16)..(16): 2'-deoxy-2'-fluoroadenosine
  modified_base (17)..(17): gm
  modified_base (18)..(18): 2'-deoxy-2'-fluoroadenosine
  modified_base (19)..(19): 2'-O-methyladenosine
  modified_base (20)..(20): 2'-deoxy-2'-fluoroadenosine
  modified_base (21)..(21): um
ucuggauggcccggaagaaau

SEQ ID NO: 5833 - RNA, 21 nt, Artificial Sequence
  siRNA sense strand against b2GPI
  modified_base (1)..(1): 2'-deoxy-2'-fluorocytidine
  modified_base (2)..(2): um
  misc_feature (2)..(3): 5'-phosphonothioate
  modified_base (3)..(3): 2'-deoxy-2'-fluoroguanosine
  modified_base (4)..(4): gm
  modified_base (5)..(5): 2'-deoxy-2'-fluoroadenosine
  modified_base (6)..(6): um
  modified_base (7)..(7): 2'-deoxy-2'-fluoroguanosine
  modified_base (8)..(8): gm
  modified_base (9)..(9): 2'-deoxy-2'-fluorocytidine
  modified_base (10)..(10): cm
  modified_base (11)..(11): 2'-deoxy-2'-fluorocytidine
  modified_base (12)..(12): 2'-deoxy-2'-fluoroguanosine
  modified_base (13)..(13): gm
  modified_base (14)..(14): 2'-deoxy-2'-fluoroadenosine
  modified_base (15)..(15): 2'-O-methyladenosine
  modified_base (16)..(16): 2'-deoxy-2'-fluoroguanosine
  modified_base (17)..(17): 2'-O-methyladenosine
  modified_base (18)..(18): 2'-deoxy-2'-fluoroadenosine
  modified_base (19)..(19): 2'-O-methyladenosine
  modified_base (20)..(20): 2'-deoxy-2'-fluorouridine
  modified_base (21)..(21): 2'-O-methyladenosine
cuggauggcccggaagaaaua

SEQ ID NO: 5834 - RNA, 21 nt, Artificial Sequence
  siRNA sense strand against b2GPI
  modified_base (1)..(1): 2'-deoxy-2'-fluoroguanosine
  modified_base (2)..(2): gm
  misc_feature (2)..(3): 5'-phosphonothioate
  modified_base (3)..(3): 2'-deoxy-2'-fluoroadenosine
  modified_base (4)..(4): um
  modified_base (5)..(5): 2'-deoxy-2'-fluoroguanosine
  modified_base (6)..(6): gm
  modified_base (7)..(7): 2'-deoxy-2'-fluorocytidine
  modified_base (8)..(8): cm
  modified_base (9)..(9): 2'-deoxy-2'-fluorocytidine
  modified_base (10)..(10): gm
  modified_base (11)..(11): 2'-deoxy-2'-fluoroguanosine
  modified_base (12)..(12): 2'-deoxy-2'-fluoroadenosine
  modified_base (13)..(13): 2'-O-methyladenosine
  modified_base (14)..(14): 2'-deoxy-2'-fluoroguanosine
  modified_base (15)..(15): 2'-O-methyladenosine
  modified_base (16)..(16): 2'-deoxy-2'-fluoroadenosine
  modified_base (17)..(17): 2'-O-methyladenosine
  modified_base (18)..(18): 2'-deoxy-2'-fluorouridine
  modified_base (19)..(19): 2'-O-methyladenosine
  modified_base (20)..(20): 2'-deoxy-2'-fluoroguanosine
  modified_base (21)..(21): 2'-O-methyladenosine
ggauggcccggaagaaauaga

SEQ ID NO: 5835 - RNA, 21 nt, Artificial Sequence
  siRNA sense strand against b2GPI
  modified_base (1)..(1): 2'-deoxy-2'-fluoroguanosine
  modified_base (2)..(2): 2'-O-methyladenosine
  misc_feature (2)..(3): 5'-phosphonothioate
  modified_base (3)..(3): 2'-deoxy-2'-fluorouridine
  modified_base (4)..(4): gm
  modified_base (5)..(5): 2'-deoxy-2'-fluoroguanosine
  modified_base (6)..(6): cm
  modified_base (7)..(7): 2'-deoxy-2'-fluorocytidine
  modified_base (8)..(8): cm
  modified_base (9)..(9): 2'-deoxy-2'-fluoroguanosine
  modified_base (10)..(10): gm
  modified_base (11)..(11): 2'-deoxy-2'-fluoroadenosine
  modified_base (12)..(12): 2'-deoxy-2'-fluoroadenosine
  modified_base (13)..(13): gm
  modified_base (14)..(14): 2'-deoxy-2'-fluoroadenosine
  modified_base (15)..(15): 2'-O-methyladenosine
  modified_base (16)..(16): 2'-deoxy-2'-fluoroadenosine
  modified_base (17)..(17): um
  modified_base (18)..(18): 2'-deoxy-2'-fluoroadenosine
  modified_base (19)..(19): gm
  modified_base (20)..(20): 2'-deoxy-2'-fluoroadenosine
  modified_base (21)..(21): 2'-O-methyladenosine
gauggcccggaagaaauagaa

SEQ ID NO: 5836 - RNA, 21 nt, Artificial Sequence
  siRNA sense strand against b2GPI
  modified_base (1)..(1): 2'-deoxy-2'-fluoroadenosine
  modified_base (2)..(2): um
  misc_feature (2)..(3): 5'-phosphonothioate
  modified_base (3)..(3): 2'-deoxy-2'-fluoroguanosine
  modified_base (4)..(4): gm
  modified_base (5)..(5): 2'-deoxy-2'-fluorocytidine
  modified_base (6)..(6): cm
  modified_base (7)..(7): 2'-deoxy-2'-fluorocytidine
  modified_base (8)..(8): gm
  modified_base (9)..(9): 2'-deoxy-2'-fluoroguanosine
  modified_base (10)..(10): 2'-O-methyladenosine
  modified_base (11)..(11): 2'-deoxy-2'-fluoroadenosine
  modified_base (12)..(12): 2'-deoxy-2'-fluoroguanosine
  modified_base (13)..(13): 2'-O-methyladenosine
  modified_base (14)..(14): 2'-deoxy-2'-fluoroadenosine
  modified_base (15)..(15): 2'-O-methyladenosine
  modified_base (16)..(16): 2'-deoxy-2'-fluorouridine
  modified_base (17)..(17): 2'-O-methyladenosine
  modified_base (18)..(18): 2'-deoxy-2'-fluoroguanosine
  modified_base (19)..(19): 2'-O-methyladenosine
  modified_base (20)..(20): 2'-deoxy-2'-fluoroadenosine
  modified_base (21)..(21): um
auggcccggaagaaauagaau

SEQ ID NO: 5837 - RNA, 21 nt, Artificial Sequence
  siRNA sense strand against b2GPI
  modified_base (1)..(1): 2'-deoxy-2'-fluorouridine
  modified_base (2)..(2): gm
  misc_feature (2)..(3): 5'-phosphonothioate
  modified_base (3)..(3): 2'-deoxy-2'-fluoroguanosine
  modified_base (4)..(4): cm
  modified_base (5)..(5): 2'-deoxy-2'-fluorocytidine
  modified_base (6)..(6): cm
  modified_base (7)..(7): 2'-deoxy-2'-fluoroguanosine
  modified_base (8)..(8): gm
  modified_base (9)..(9): 2'-deoxy-2'-fluoroadenosine
  modified_base (10)..(10): 2'-O-methyladenosine
  modified_base (11)..(11): 2'-deoxy-2'-fluoroguanosine
  modified_base (12)..(12): 2'-deoxy-2'-fluoroadenosine
  modified_base (13)..(13): 2'-O-methyladenosine
  modified_base (14)..(14): 2'-deoxy-2'-fluoroadenosine
  modified_base (15)..(15): um
  modified_base (16)..(16): 2'-deoxy-2'-fluoroadenosine
  modified_base (17)..(17): gm
  modified_base (18)..(18): 2'-deoxy-2'-fluoroadenosine
  modified_base (19)..(19): 2'-O-methyladenosine
  modified_base (20)..(20): 2'-deoxy-2'-fluorouridine
  modified_base (21)..(21): gm
uggcccggaagaaauagaaug

SEQ ID NO: 5838 - RNA, 21 nt, Artificial Sequence
  siRNA sense strand against b2GPI
  modified_base (1)..(1): 2'-deoxy-2'-fluoroguanosine
  modified_base (2)..(2): gm
  misc_feature (2)..(3): 5'-phosphonothioate
  modified_base (3)..(3): 2'-deoxy-2'-fluorocytidine
  modified_base (4)..(4): cm
  modified_base (5)..(5): 2'-deoxy-2'-fluorocytidine
  modified_base (6)..(6): gm
  modified_base (7)..(7): 2'-deoxy-2'-fluoroguanosine
  modified_base (8)..(8): 2'-O-methyladenosine
  modified_base (9)..(9): 2'-deoxy-2'-fluoroadenosine
  modified_base (10)..(10): gm
  modified_base (11)..(11): 2'-deoxy-2'-fluoroadenosine
  modified_base (12)..(12): 2'-deoxy-2'-fluoroadenosine
  modified_base (13)..(13): 2'-O-methyladenosine
  modified_base (14)..(14): 2'-deoxy-2'-fluorouridine
  modified_base (15)..(15): 2'-O-methyladenosine
  modified_base (16)..(16): 2'-deoxy-2'-fluoroguanosine
  modified_base (17)..(17): 2'-O-methyladenosine
  modified_base (18)..(18): 2'-deoxy-2'-fluoroadenosine
  modified_base (19)..(19): um
  modified_base (20)..(20): 2'-deoxy-2'-fluoroguanosine
  modified_base (21)..(21): um
ggcccggaagaaauagaaugu

SEQ ID NO: 5839 - RNA, 21 nt, Artificial Sequence
  siRNA sense strand against b2GPI
  modified_base (1)..(1): 2'-deoxy-2'-fluorocytidine
  modified_base (2)..(2): cm
  misc_feature (2)..(3): 5'-phosphonothioate
  modified_base (3)..(3): 2'-deoxy-2'-fluorocytidine
  modified_base (4)..(4): gm
  modified_base (5)..(5): 2'-deoxy-2'-fluoroguanosine
  modified_base (6)..(6): 2'-O-methyladenosine
  modified_base (7)..(7): 2'-deoxy-2'-fluoroadenosine
  modified_base (8)..(8): gm
  modified_base (9)..(9): 2'-deoxy-2'-fluoroadenosine
  modified_base (10)..(10): 2'-O-methyladenosine
  modified_base (11)..(11): 2'-deoxy-2'-fluoroadenosine
  modified_base (12)..(12): 2'-deoxy-2'-fluorouridine
  modified_base (13)..(13): 2'-O-methyladenosine
  modified_base (14)..(14): 2'-deoxy-2'-fluoroguanosine
  modified_base (15)..(15): 2'-O-methyladenosine
  modified_base (16)..(16): 2'-deoxy-2'-fluoroadenosine
  modified_base (17)..(17): um
  modified_base (18)..(18): 2'-deoxy-2'-fluoroguanosine
  modified_base (19)..(19): um
  modified_base (20)..(20): 2'-deoxy-2'-fluoroadenosine
  modified_base (21)..(21): cm
cccggaagaaauagaauguac

SEQ ID NO: 5840 - RNA, 21 nt, Artificial Sequence
  siRNA sense strand against b2GPI
  modified_base (1)..(1): 2'-deoxy-2'-fluorocytidine
  modified_base (2)..(2): cm
  misc_feature (2)..(3): 5'-phosphonothioate
  modified_base (3)..(3): 2'-deoxy-2'-fluoroguanosine
  modified_base (4)..(4): gm
  modified_base (5)..(5): 2'-deoxy-2'-fluoroadenosine
  modified_base (6)..(6): 2'-O-methyladenosine
  modified_base (7)..(7): 2'-deoxy-2'-fluoroguanosine
  modified_base (8)..(8): 2'-O-methyladenosine
  modified_base (9)..(9): 2'-deoxy-2'-fluoroadenosine
  modified_base (10)..(10): 2'-O-methyladenosine
  modified_base (11)..(11): 2'-deoxy-2'-fluorouridine
  modified_base (12)..(12): 2'-deoxy-2'-fluoroadenosine
  modified_base (13)..(13): gm
  modified_base (14)..(14): 2'-deoxy-2'-fluoroadenosine
  modified_base (15)..(15): 2'-O-methyladenosine
  modified_base (16)..(16): 2'-deoxy-2'-fluorouridine
  modified_base (17)..(17): gm
  modified_base (18)..(18): 2'-deoxy-2'-fluorouridine
  modified_base (19)..(19): 2'-O-methyladenosine
  modified_base (20)..(20): 2'-deoxy-2'-fluorocytidine
  modified_base (21)..(21): cm
ccggaagaaauagaauguacc

SEQ ID NO: 5841 - RNA, 21 nt, Artificial Sequence
  siRNA sense strand against b2GPI
  modified_base (1)..(1): 2'-deoxy-2'-fluorocytidine
  modified_base (2)..(2): gm
  misc_feature (2)..(3): 5'-phosphonothioate
  modified_base (3)..(3): 2'-deoxy-2'-fluoroguanosine
  modified_base (4)..(4): 2'-O-methyladenosine
  modified_base (5)..(5): 2'-deoxy-2'-fluoroadenosine
  modified_base (6)..(6): gm
  modified_base (7)..(7): 2'-deoxy-2'-fluoroadenosine
  modified_base (8)..(8): 2'-O-methyladenosine
  modified_base (9)..(9): 2'-deoxy-2'-fluoroadenosine
  modified_base (10)..(10): um
  modified_base (11)..(11): 2'-deoxy-2'-fluoroadenosine
  modified_base (12)..(12): 2'-deoxy-2'-fluoroguanosine
  modified_base (13)..(13): 2'-O-methyladenosine
  modified_base (14)..(14): 2'-deoxy-2'-fluoroadenosine
  modified_base (15)..(15): um
  modified_base (16)..(16): 2'-deoxy-2'-fluoroguanosine
  modified_base (17)..(17): um
  modified_base (18)..(18): 2'-deoxy-2'-fluoroadenosine
  modified_base (19)..(19): cm
  modified_base (20)..(20): 2'-deoxy-2'-fluorocytidine
  modified_base (21)..(21): 2'-O-methyladenosine
cggaagaaauagaauguacca

SEQ ID NO: 5842 - RNA, 21 nt, Artificial Sequence
  siRNA sense strand against b2GPI
  modified_base (1)..(1): 2'-deoxy-2'-fluoroadenosine
  modified_base (2)..(2): 2'-O-methyladenosine
  misc_feature (2)..(3): 5'-phosphonothioate
  modified_base (3)..(3): 2'-deoxy-2'-fluoroguanosine
  modified_base (4)..(4): 2'-O-methyladenosine
  modified_base (5)..(5): 2'-deoxy-2'-fluoroadenosine
  modified_base (6)..(6): 2'-O-methyladenosine
  modified_base (7)..(7): 2'-deoxy-2'-fluorouridine
  modified_base (8)..(8): 2'-O-methyladenosine
  modified_base (9)..(9): 2'-deoxy-2'-fluoroguanosine
  modified_base (10)..(10): 2'-O-methyladenosine
  modified_base (11)..(11): 2'-deoxy-2'-fluoroadenosine
  modified_base (12)..(12): 2'-deoxy-2'-fluorouridine
  modified_base (13)..(13): gm
  modified_base (14)..(14): 2'-deoxy-2'-fluorouridine
  modified_base (15)..(15): 2'-O-methyladenosine
  modified_base (16)..(16): 2'-deoxy-2'-fluorocytidine
  modified_base (17)..(17): cm
  modified_base (18)..(18): 2'-deoxy-2'-fluoroadenosine
  modified_base (19)..(19): 2'-O-methyladenosine
  modified_base (20)..(20): 2'-deoxy-2'-fluoroadenosine
  modified_base (21)..(21): cm
aagaaauagaauguaccaaac

SEQ ID NO: 5843 - RNA, 21 nt, Artificial Sequence
  siRNA sense strand against b2GPI
  modified_base (1)..(1): 2'-deoxy-2'-fluoroadenosine
  modified_base (2)..(2): um
  misc_feature (2)..(3): 5'-phosphonothioate
  modified_base (3)..(3): 2'-deoxy-2'-fluoroadenosine
  modified_base (4)..(4): gm
  modified_base (5)..(5): 2'-deoxy-2'-fluoroadenosine
  modified_base (6)..(6): 2'-O-methyladenosine
  modified_base (7)..(7): 2'-deoxy-2'-fluorouridine
  modified_base (8)..(8): gm
  modified_base (9)..(9): 2'-deoxy-2'-fluorouridine
  modified_base (10)..(10): 2'-O-methyladenosine
  modified_base (11)..(11): 2'-deoxy-2'-fluorocytidine
  modified_base (12)..(12): 2'-deoxy-2'-fluorocytidine
  modified_base (13)..(13): 2'-O-methyladenosine
  modified_base (14)..(14): 2'-deoxy-2'-fluoroadenosine
  modified_base (15)..(15): 2'-O-methyladenosine
  modified_base (16)..(16): 2'-deoxy-2'-fluorocytidine
  modified_base (17)..(17): um
  modified_base (18)..(18): 2'-deoxy-2'-fluoroguanosine
  modified_base (19)..(19): gm
  modified_base (20)..(20): 2'-deoxy-2'-fluoroguanosine
  modified_base (21)..(21): 2'-O-methyladenosine
auagaauguaccaaacuggga

SEQ ID NO: 5844 - RNA, 21 nt, Artificial Sequence
  siRNA sense strand against b2GPI
  modified_base (1)..(1): 2'-deoxy-2'-fluorouridine
  modified_base (2)..(2): 2'-O-methyladenosine
  misc_feature (2)..(3): 5'-phosphonothioate
  modified_base (3)..(3): 2'-deoxy-2'-fluoroguanosine
  modified_base (4)..(4): 2'-O-methyladenosine
  modified_base (5)..(5): 2'-deoxy-2'-fluoroadenosine
  modified_base (6)..(6): um
  modified_base (7)..(7): 2'-deoxy-2'-fluoroguanosine
  modified_base (8)..(8): um
  modified_base (9)..(9): 2'-deoxy-2'-fluoroadenosine
  modified_base (10)..(10): cm
  modified_base (11)..(11): 2'-deoxy-2'-fluorocytidine
  modified_base (12)..(12): 2'-deoxy-2'-fluoroadenosine
  modified_base (13)..(13): 2'-O-methyladenosine
  modified_base (14)..(14): 2'-deoxy-2'-fluoroadenosine
  modified_base (15)..(15): cm
  modified_base (16)..(16): 2'-deoxy-2'-fluorouridine
  modified_base (17)..(17): gm
  modified_base (18)..(18): 2'-deoxy-2'-fluoroguanosine
  modified_base (19)..(19): gm
  modified_base (20)..(20): 2'-deoxy-2'-fluoroadenosine
  modified_base (21)..(21): 2'-O-methyladenosine
uagaauguaccaaacugggaa

SEQ ID NO: 5845 - RNA, 21 nt, Artificial Sequence
  siRNA sense strand against b2GPI
  modified_base (1)..(1): 2'-deoxy-2'-fluoroadenosine
  modified_base (2)..(2): gm
  misc_feature (2)..(3): 5'-phosphonothioate
  modified_base (3)..(3): 2'-deoxy-2'-fluoroadenosine
  modified_base (4)..(4): 2'-O-methyladenosine
  modified_base (5)..(5): 2'-deoxy-2'-fluorouridine
  modified_base (6)..(6): gm
  modified_base (7)..(7): 2'-deoxy-2'-fluorouridine
  modified_base (8)..(8): 2'-O-methyladenosine
  modified_base (9)..(9): 2'-deoxy-2'-fluorocytidine
  modified_base (10)..(10): cm
  modified_base (11)..(11): 2'-deoxy-2'-fluoroadenosine
  modified_base (12)..(12): 2'-deoxy-2'-fluoroadenosine
  modified_base (13)..(13): 2'-O-methyladenosine
  modified_base (14)..(14): 2'-deoxy-2'-fluorocytidine
  modified_base (15)..(15): um
  modified_base (16)..(16): 2'-deoxy-2'-fluoroguanosine
  modified_base (17)..(17): gm
  modified_base (18)..(18): 2'-deoxy-2'-fluoroguanosine
  modified_base (19)..(19): 2'-O-methyladenosine
  modified_base (20)..(20): 2'-deoxy-2'-fluoroadenosine
  modified_base (21)..(21): 2'-O-methyladenosine
agaauguaccaaacugggaaa

SEQ ID NO: 5846 - RNA, 21 nt, Artificial Sequence
  siRNA sense strand against b2GPI
  modified_base (1)..(1): 2'-deoxy-2'-fluoroadenosine
  modified_base (2)..(2): um
  misc_feature (2)..(3): 5'-phosphonothioate
  modified_base (3)..(3): 2'-deoxy-2'-fluoroguanosine
  modified_base (4)..(4): um
  modified_base (5)..(5): 2'-deoxy-2'-fluoroadenosine
  modified_base (6)..(6): cm
  modified_base (7)..(7): 2'-deoxy-2'-fluorocytidine
  modified_base (8)..(8): 2'-O-methyladenosine
  modified_base (9)..(9): 2'-deoxy-2'-fluoroadenosine
  modified_base (10)..(10): 2'-O-methyladenosine
  modified_base (11)..(11): 2'-deoxy-2'-fluorocytidine
  modified_base (12)..(12): 2'-deoxy-2'-fluorouridine
  modified_base (13)..(13): gm
  modified_base (14)..(14): 2'-deoxy-2'-fluoroguanosine
  modified_base (15)..(15): gm
  modified_base (16)..(16): 2'-deoxy-2'-fluoroadenosine
  modified_base (17)..(17): 2'-O-methyladenosine
  modified_base (18)..(18): 2'-deoxy-2'-fluoroadenosine
  modified_base (19)..(19): cm
  modified_base (20)..(20): 2'-deoxy-2'-fluorouridine
  modified_base (21)..(21): gm
auguaccaaacugggaaacug

SEQ ID NO: 5847 - RNA, 21 nt, Artificial Sequence
  siRNA sense strand against b2GPI
  modified_base (1)..(1): 2'-deoxy-2'-fluoroadenosine
  modified_base (2)..(2): cm
  misc_feature (2)..(3): 5'-phosphonothioate
  modified_base (3)..(3): 2'-deoxy-2'-fluorocytidine
  modified_base (4)..(4): 2'-O-methyladenosine
  modified_base (5)..(5): 2'-deoxy-2'-fluoroadenosine
  modified_base (6)..(6): 2'-O-methyladenosine
  modified_base (7)..(7): 2'-deoxy-2'-fluorocytidine
  modified_base (8)..(8): um
  modified_base (9)..(9): 2'-deoxy-2'-fluoroguanosine
  modified_base (10)..(10): gm
  modified_base (11)..(11): 2'-deoxy-2'-fluoroguanosine
  modified_base (12)..(12): 2'-deoxy-2'-fluoroadenosine
  modified_base (13)..(13): 2'-O-methyladenosine
  modified_base (14)..(14): 2'-deoxy-2'-fluoroadenosine
  modified_base (15)..(15): cm
  modified_base (16)..(16): 2'-deoxy-2'-fluorouridine
  modified_base (17)..(17): gm
  modified_base (18)..(18): 2'-deoxy-2'-fluoroguanosine
  modified_base (19)..(19): um
  modified_base (20)..(20): 2'-deoxy-2'-fluorocytidine
  modified_base (21)..(21): um
accaaacugggaaacuggucu

SEQ ID NO: 5848 - RNA, 21 nt, Artificial Sequence
  siRNA sense strand against b2GPI
  modified_base (1)..(1): 2'-deoxy-2'-fluorocytidine
  modified_base (2)..(2): cm
  misc_feature (2)..(3): 5'-phosphonothioate
  modified_base (3)..(3): 2'-deoxy-2'-fluoroadenosine
  modified_base (4)..(4): 2'-O-methyladenosine
  modified_base (5)..(5): 2'-deoxy-2'-fluoroadenosine
  modified_base (6)..(6): cm
  modified_base (7)..(7): 2'-deoxy-2'-fluorouridine
  modified_base (8)..(8): gm
  modified_base (9)..(9): 2'-deoxy-2'-fluoroguanosine
  modified_base (10)..(10): gm
  modified_base (11)..(11): 2'-deoxy-2'-fluoroadenosine
  modified_base (12)..(12): 2'-deoxy-2'-fluoroadenosine
  modified_base (13)..(13): 2'-O-methyladenosine
  modified_base (14)..(14): 2'-deoxy-2'-fluorocytidine
  modified_base (15)..(15): um
  modified_base (16)..(16): 2'-deoxy-2'-fluoroguanosine
  modified_base (17)..(17): gm
  modified_base (18)..(18): 2'-deoxy-2'-fluorouridine
  modified_base (19)..(19): cm
  modified_base (20)..(20): 2'-deoxy-2'-fluorouridine
  modified_base (21)..(21): gm
ccaaacugggaaacuggucug

SEQ ID NO: 5849 - RNA, 21 nt, Artificial Sequence
  siRNA sense strand against b2GPI
  modified_base (1)..(1): 2'-deoxy-2'-fluoroadenosine
  modified_base (2)..(2): 2'-O-methyladenosine
  misc_feature (2)..(3): 5'-phosphonothioate
  modified_base (3)..(3): 2'-deoxy-2'-fluorocytidine
  modified_base (4)..(4): um
  modified_base (5)..(5): 2'-deoxy-2'-fluoroguanosine
  modified_base (6)..(6): gm
  modified_base (7)..(7): 2'-deoxy-2'-fluoroguanosine
  modified_base (8)..(8): 2'-O-methyladenosine
  modified_base (9)..(9): 2'-deoxy-2'-fluoroadenosine
  modified_base (10)..(10): 2'-O-methyladenosine
  modified_base (11)..(11): 2'-deoxy-2'-fluorocytidine
  modified_base (12)..(12): 2'-deoxy-2'-fluorouridine
  modified_base (13)..(13): gm
  modified_base (14)..(14): 2'-deoxy-2'-fluoroguanosine
  modified_base (15)..(15): um
  modified_base (16)..(16): 2'-deoxy-2'-fluorocytidine
  modified_base (17)..(17): um
  modified_base (18)..(18): 2'-deoxy-2'-fluoroguanosine
  modified_base (19)..(19): cm
  modified_base (20)..(20): 2'-deoxy-2'-fluorocytidine
  modified_base (21)..(21): 2'-O-methyladenosine
aacugggaaacuggucugcca

SEQ ID NO: 5850 - RNA, 21 nt, Artificial Sequence
  siRNA sense strand against b2GPI
  modified_base (1)..(1): 2'-deoxy-2'-fluoroadenosine
  modified_base (2)..(2): cm
  misc_feature (2)..(3): 5'-phosphonothioate
  modified_base (3)..(3): 2'-deoxy-2'-fluorouridine
  modified_base (4)..(4): gm
  modified_base (5)..(5): 2'-deoxy-2'-fluoroguanosine
  modified_base (6)..(6): gm
  modified_base (7)..(7): 2'-deoxy-2'-fluoroadenosine
  modified_base (8)..(8): 2'-O-methyladenosine
  modified_base (9)..(9): 2'-deoxy-2'-fluoroadenosine
  modified_base (10)..(10): cm
  modified_base (11)..(11): 2'-deoxy-2'-fluorouridine
  modified_base (12)..(12): 2'-deoxy-2'-fluoroguanosine
  modified_base (13)..(13): gm
  modified_base (14)..(14): 2'-deoxy-2'-fluorouridine
  modified_base (15)..(15): cm
  modified_base (16)..(16): 2'-deoxy-2'-fluorouridine
  modified_base (17)..(17): gm
  modified_base (18)..(18): 2'-deoxy-2'-fluorocytidine
  modified_base (19)..(19): cm
  modified_base (20)..(20): 2'-deoxy-2'-fluoroadenosine
  modified_base (21)..(21): um
acugggaaacuggucugccau

SEQ ID NO: 5851 - RNA, 21 nt, Artificial Sequence
  siRNA sense strand against b2GPI
  modified_base (1)..(1): 2'-deoxy-2'-fluorocytidine
  modified_base (2)..(2): um
  misc_feature (2)..(3): 5'-phosphonothioate
  modified_base (3)..(3): 2'-deoxy-2'-fluoroguanosine
  modified_base (4)..(4): gm
  modified_base (5)..(5): 2'-deoxy-2'-fluoroguanosine
  modified_base (6)..(6): 2'-O-methyladenosine
  modified_base (7)..(7): 2'-deoxy-2'-fluoroadenosine
  modified_base (8)..(8): 2'-O-methyladenosine
  modified_base (9)..(9): 2'-deoxy-2'-fluorocytidine
  modified_base (10)..(10): um
  modified_base (11)..(11): 2'-deoxy-2'-fluoroguanosine
  modified_base (12)..(12): 2'-deoxy-2'-fluoroguanosine
  modified_base (13)..(13): um
  modified_base (14)..(14): 2'-deoxy-2'-fluorocytidine
  modified_base (15)..(15): um
  modified_base (16)..(16): 2'-deoxy-2'-fluoroguanosine
  modified_base (17)..(17): cm
  modified_base (18)..(18): 2'-deoxy-2'-fluorocytidine
  modified_base (19)..(19): 2'-O-methyladenosine
  modified_base (20)..(20): 2'-deoxy-2'-fluorouridine
  modified_base (21)..(21): gm
cugggaaacuggucugccaug

SEQ ID NO: 5852 - RNA, 21 nt, Artificial Sequence
  siRNA sense strand against b2GPI
  modified_base (1)..(1): 2'-deoxy-2'-fluorouridine
  modified_base (2)..(2): gm
  misc_feature (2)..(3): 5'-phosphonothioate
  modified_base (3)..(3): 2'-deoxy-2'-fluoroguanosine
  modified_base (4)..(4): gm
  modified_base (5)..(5): 2'-deoxy-2'-fluoroadenosine
  modified_base (6)..(6): 2'-O-methyladenosine
  modified_base (7)..(7): 2'-deoxy-2'-fluoroadenosine
  modified_base (8)..(8): cm
  modified_base (9)..(9): 2'-deoxy-2'-fluorouridine
  modified_base (10)..(10): gm
  modified_base (11)..(11): 2'-deoxy-2'-fluoroguanosine
  modified_base (12)..(12): 2'-deoxy-2'-fluorouridine
  modified_base (13)..(13): cm
  modified_base (14)..(14): 2'-deoxy-2'-fluorouridine
  modified_base (15)..(15): gm
  modified_base (16)..(16): 2'-deoxy-2'-fluorocytidine
  modified_base (17)..(17): cm
  modified_base (18)..(18): 2'-deoxy-2'-fluoroadenosine
  modified_base (19)..(19): um
  modified_base (20)..(20): 2'-deoxy-2'-fluoroguanosine
  modified_base (21)..(21): cm
ugggaaacuggucugccaugc

SEQ ID NO: 5853 - RNA, 21 nt, Artificial Sequence
  siRNA sense strand against b2GPI
  modified_base (1)..(1): 2'-deoxy-2'-fluoroguanosine
  modified_base (2)..(2): gm
  misc_feature (2)..(3): 5'-phosphonothioate
  modified_base (3)..(3): 2'-deoxy-2'-fluoroadenosine
  modified_base (4)..(4): 2'-O-methyladenosine
  modified_base (5)..(5): 2'-deoxy-2'-fluoroadenosine
  modified_base (6)..(6): cm
  modified_base (7)..(7): 2'-deoxy-2'-fluorouridine
  modified_base (8)..(8): gm
  modified_base (9)..(9): 2'-deoxy-2'-fluoroguanosine
  modified_base (10)..(10): um
  modified_base (11)..(11): 2'-deoxy-2'-fluorocytidine
  modified_base (12)..(12): 2'-deoxy-2'-fluorouridine
  modified_base (13)..(13): gm
  modified_base (14)..(14): 2'-deoxy-2'-fluorocytidine
  modified_base (15)..(15): cm
  modified_base (16)..(16): 2'-deoxy-2'-fluoroadenosine
  modified_base (17)..(17): um
  modified_base (18)..(18): 2'-deoxy-2'-fluoroguanosine
  modified_base (19)..(19): cm
  modified_base (20)..(20): 2'-deoxy-2'-fluorocytidine
  modified_base (21)..(21): 2'-O-methyladenosine
ggaaacuggucugccaugcca

SEQ ID NO: 5854 - RNA, 21 nt, Artificial Sequence
  siRNA sense strand against b2GPI
  modified_base (1)..(1): 2'-deoxy-2'-fluoroguanosine
  modified_base (2)..(2): 2'-O-methyladenosine
  misc_feature (2)..(3): 5'-phosphonothioate
  modified_base (3)..(3): 2'-deoxy-2'-fluoroadenosine
  modified_base (4)..(4): 2'-O-methyladenosine
  modified_base (5)..(5): 2'-deoxy-2'-fluorocytidine
  modified_base (6)..(6): um
  modified_base (7)..(7): 2'-deoxy-2'-fluoroguanosine
  modified_base (8)..(8): gm
  modified_base (9)..(9): 2'-deoxy-2'-fluorouridine
  modified_base (10)..(10): cm
  modified_base (11)..(11): 2'-deoxy-2'-fluorouridine
  modified_base (12)..(12): 2'-deoxy-2'-fluoroguanosine
  modified_base (13)..(13): cm
  modified_base (14)..(14): 2'-deoxy-2'-fluorocytidine
  modified_base (15)..(15): 2'-O-methyladenosine
  modified_base (16)..(16): 2'-deoxy-2'-fluorouridine
  modified_base (17)..(17): gm
  modified_base (18)..(18): 2'-deoxy-2'-fluorocytidine
  modified_base (19)..(19): cm
  modified_base (20)..(20): 2'-deoxy-2'-fluoroadenosine
  modified_base (21)..(21): 2'-O-methyladenosine
gaaacuggucugccaugccaa

SEQ ID NO: 5855 - RNA, 21 nt, Artificial Sequence
  siRNA sense strand against b2GPI
  modified_base (1)..(1): 2'-deoxy-2'-fluoroadenosine
  modified_base (2)..(2): 2'-O-methyladenosine
  misc_feature (2)..(3): 5'-phosphonothioate
  modified_base (3)..(3): 2'-deoxy-2'-fluoroadenosine
  modified_base (4)..(4): cm
  modified_base (5)..(5): 2'-deoxy-2'-fluorouridine
  modified_base (6)..(6): gm
  modified_base (7)..(7): 2'-deoxy-2'-fluoroguanosine
  modified_base (8)..(8): um
  modified_base (9)..(9): 2'-deoxy-2'-fluorocytidine
  modified_base (10)..(10): um
  modified_base (11)..(11): 2'-deoxy-2'-fluoroguanosine
  modified_base (12)..(12): 2'-deoxy-2'-fluorocytidine
  modified_base (13)..(13): cm
  modified_base (14)..(14): 2'-deoxy-2'-fluoroadenosine
  modified_base (15)..(15): um
  modified_base (16)..(16): 2'-deoxy-2'-fluoroguanosine
  modified_base (17)..(17): cm
  modified_base (18)..(18): 2'-deoxy-2'-fluorocytidine
  modified_base (19)..(19): 2'-O-methyladenosine
  modified_base (20)..(20): 2'-deoxy-2'-fluoroadenosine
  modified_base (21)..(21): gm
aaacuggucugccaugccaag

SEQ ID NO: 5856 - RNA, 21 nt, Artificial Sequence
  siRNA sense strand against b2GPI
  modified_base (1)..(1): 2'-deoxy-2'-fluoroadenosine
  modified_base (2)..(2): 2'-O-methyladenosine
  misc_feature (2)..(3): 5'-phosphonothioate
  modified_base (3)..(3): 2'-deoxy-2'-fluorocytidine
  modified_base (4)..(4): um
  modified_base (5)..(5): 2'-deoxy-2'-fluoroguanosine
  modified_base (6)..(6): gm
  modified_base (7)..(7): 2'-deoxy-2'-fluorouridine
  modified_base (8)..(8): cm
  modified_base (9)..(9): 2'-deoxy-2'-fluorouridine
  modified_base (10)..(10): gm
  modified_base (11)..(11): 2'-deoxy-2'-fluorocytidine
  modified_base (12)..(12): 2'-deoxy-2'-fluorocytidine
  modified_base (13)..(13): 2'-O-methyladenosine
  modified_base (14)..(14): 2'-deoxy-2'-fluorouridine
  modified_base (15)..(15): gm
  modified_base (16)..(16): 2'-deoxy-2'-fluorocytidine
  modified_base (17)..(17): cm
  modified_base (18)..(18): 2'-deoxy-2'-fluoroadenosine
  modified_base (19)..(19): 2'-O-methyladenosine
  modified_base (20)..(20): 2'-deoxy-2'-fluoroguanosine
  modified_base (21)..(21): um
aacuggucugccaugccaagu

SEQ ID NO: 5857 - RNA, 21 nt, Artificial Sequence
  siRNA sense strand against b2GPI
  modified_base (1)..(1): 2'-deoxy-2'-fluoroadenosine
  modified_base (2)..(2): cm
  misc_feature (2)..(3): 5'-phosphonothioate
  modified_base (3)..(3): 2'-deoxy-2'-fluorouridine
  modified_base (4)..(4): gm
  modified_base (5)..(5): 2'-deoxy-2'-fluoroguanosine
  modified_base (6)..(6): um
  modified_base (7)..(7): 2'-deoxy-2'-fluorocytidine
  modified_base (8)..(8): um
  modified_base (9)..(9): 2'-deoxy-2'-fluoroguanosine
  modified_base (10)..(10): cm
  modified_base (11)..(11): 2'-deoxy-2'-fluorocytidine
  modified_base (12)..(12): 2'-deoxy-2'-fluoroadenosine
  modified_base (13)..(13): um
  modified_base (14)..(14): 2'-deoxy-2'-fluoroguanosine
  modified_base (15)..(15): cm
  modified_base (16)..(16): 2'-deoxy-2'-fluorocytidine
  modified_base (17)..(17): 2'-O-methyladenosine
  modified_base (18)..(18): 2'-deoxy-2'-fluoroadenosine
  modified_base (19)..(19): gm
  modified_base (20)..(20): 2'-deoxy-2'-fluorouridine
  modified_base (21)..(21): um
acuggucugccaugccaaguu

SEQ ID NO: 5858 - RNA, 21 nt, Artificial Sequence
  siRNA sense strand against b2GPI
  modified_base (1)..(1): 2'-deoxy-2'-fluorocytidine
  modified_base (2)..(2): um
  misc_feature (2)..(3): 5'-phosphonothioate
  modified_base (3)..(3): 2'-deoxy-2'-fluoroguanosine
  modified_base (4)..(4): gm
  modified_base (5)..(5): 2'-deoxy-2'-fluorouridine
  modified_base (6)..(6): cm
  modified_base (7)..(7): 2'-deoxy-2'-fluorouridine
  modified_base (8)..(8): gm
  modified_base (9)..(9): 2'-deoxy-2'-fluorocytidine
  modified_base (10)..(10): cm
  modified_base (11)..(11): 2'-deoxy-2'-fluoroadenosine
  modified_base (12)..(12): 2'-deoxy-2'-fluorouridine
  modified_base (13)..(13): gm
  modified_base (14)..(14): 2'-deoxy-2'-fluorocytidine
  modified_base (15)..(15): cm
  modified_base (16)..(16): 2'-deoxy-2'-fluoroadenosine
  modified_base (17)..(17): 2'-O-methyladenosine
  modified_base (18)..(18): 2'-deoxy-2'-fluoroguanosine
  modified_base (19)..(19): um
  modified_base (20)..(20): 2'-deoxy-2'-fluorouridine
  modified_base (21)..(21): gm
cuggucugccaugccaaguug

SEQ ID NO: 5859 - RNA, 21 nt, Artificial Sequence
  siRNA sense strand against b2GPI
  modified_base (1)..(1): 2'-deoxy-2'-fluorouridine
  modified_base (2)..(2): gm
  misc_feature (2)..(3): 5'-phosphonothioate
  modified_base (3)..(3): 2'-deoxy-2'-fluoroguanosine
  modified_base (4)..(4): um
  modified_base (5)..(5): 2'-deoxy-2'-fluorocytidine
  modified_base (6)..(6): um
  modified_base (7)..(7): 2'-deoxy-2'-fluoroguanosine
  modified_base (8)..(8): cm
  modified_base (9)..(9): 2'-deoxy-2'-fluorocytidine
  modified_base (10)..(10): 2'-O-methyladenosine
  modified_base (11)..(11): 2'-deoxy-2'-fluorouridine
  modified_base (12)..(12): 2'-deoxy-2'-fluoroguanosine
  modified_base (13)..(13): cm
  modified_base (14)..(14): 2'-deoxy-2'-fluorocytidine
  modified_base (15)..(15): 2'-O-methyladenosine
  modified_base (16)..(16): 2'-deoxy-2'-fluoroadenosine
  modified_base (17)..(17): gm
  modified_base (18)..(18): 2'-deoxy-2'-fluorouridine
  modified_base (19)..(19): um
  modified_base (20)..(20): 2'-deoxy-2'-fluoroguanosine
  modified_base (21)..(21): um
uggucugccaugccaaguugu

SEQ ID NO: 5860 - RNA, 21 nt, Artificial Sequence
  siRNA sense strand against b2GPI
  modified_base (1)..(1): 2'-deoxy-2'-fluoroguanosine
  modified_base (2)..(2): gm
  misc_feature (2)..(3): 5'-phosphonothioate
  modified_base (3)..(3): 2'-deoxy-2'-fluorouridine
  modified_base (4)..(4): cm
  modified_base (5)..(5): 2'-deoxy-2'-fluorouridine
  modified_base (6)..(6): gm
  modified_base (7)..(7): 2'-deoxy-2'-fluorocytidine
  modified_base (8)..(8): cm
  modified_base (9)..(9): 2'-deoxy-2'-fluoroadenosine
  modified_base (10)..(10): um
  modified_base (11)..(11): 2'-deoxy-2'-fluoroguanosine
  modified_base (12)..(12): 2'-deoxy-2'-fluorocytidine
  modified_base (13)..(13): cm
  modified_base (14)..(14): 2'-deoxy-2'-fluoroadenosine
  modified_base (15)..(15): 2'-O-methyladenosine
  modified_base (16)..(16): 2'-deoxy-2'-fluoroguanosine
  modified_base (17)..(17): um
  modified_base (18)..(18): 2'-deoxy-2'-fluorouridine
  modified_base (19)..(19): gm
  modified_base (20)..(20): 2'-deoxy-2'-fluorouridine
  modified_base (21)..(21): 2'-O-methyladenosine
ggucugccaugccaaguugua

SEQ ID NO: 5861 - RNA, 21 nt, Artificial Sequence
  siRNA sense strand against b2GPI
  modified_base (1)..(1): 2'-deoxy-2'-fluoroguanosine
  modified_base (2)..(2): um
  misc_feature (2)..(3): 5'-phosphonothioate
  modified_base (3)..(3): 2'-deoxy-2'-fluorocytidine
  modified_base (4)..(4): um
  modified_base (5)..(5): 2'-deoxy-2'-fluoroguanosine
  modified_base (6)..(6): cm
  modified_base (7)..(7): 2'-deoxy-2'-fluorocytidine
  modified_base (8)..(8): 2'-O-methyladenosine
  modified_base (9)..(9): 2'-deoxy-2'-fluorouridine
  modified_base (10)..(10): gm
  modified_base (11)..(11): 2'-deoxy-2'-fluorocytidine
  modified_base (12)..(12): 2'-deoxy-2'-fluorocytidine
  modified_base (13)..(13): 2'-O-methyladenosine
  modified_base (14)..(14): 2'-deoxy-2'-fluoroadenosine
  modified_base (15)..(15): gm
  modified_base (16)..(16): 2'-deoxy-2'-fluorouridine
  modified_base (17)..(17): um
  modified_base (18)..(18): 2'-deoxy-2'-fluoroguanosine
  modified_base (19)..(19): um
  modified_base (20)..(20): 2'-deoxy-2'-fluoroadenosine
  modified_base (21)..(21): 2'-O-methyladenosine
gucugccaugccaaguuguaa

SEQ ID NO: 5862 - RNA, 21 nt, Artificial Sequence
  siRNA sense strand against b2GPI
  modified_base (1)..(1): 2'-deoxy-2'-fluorouridine
  modified_base (2)..(2): cm
  misc_feature (2)..(3): 5'-phosphonothioate
  modified_base (3)..(3): 2'-deoxy-2'-fluorouridine
  modified_base (4)..(4): gm
  modified_base (5)..(5): 2'-deoxy-2'-fluorocytidine
  modified_base (6)..(6): cm
  modified_base (7)..(7): 2'-deoxy-2'-fluoroadenosine
  modified_base (8)..(8): um
  modified_base (9)..(9): 2'-deoxy-2'-fluoroguanosine
  modified_base (10)..(10): cm
  modified_base (11)..(11): 2'-deoxy-2'-fluorocytidine
  modified_base (12)..(12): 2'-deoxy-2'-fluoroadenosine
  modified_base (13)..(13): 2'-O-methyladenosine
  modified_base (14)..(14): 2'-deoxy-2'-fluoroguanosine
  modified_base (15)..(15): um
  modified_base (16)..(16): 2'-deoxy-2'-fluorouridine
  modified_base (17)..(17): gm
  modified_base (18)..(18): 2'-deoxy-2'-fluorouridine
  modified_base (19)..(19): 2'-O-methyladenosine
  modified_base (20)..(20): 2'-deoxy-2'-fluoroadenosine
  modified_base (21)..(21): 2'-O-methyladenosine
ucugccaugccaaguuguaaa

SEQ ID NO: 5863 - RNA, 21 nt, Artificial Sequence
  siRNA sense strand against b2GPI
  modified_base (1)..(1): 2'-deoxy-2'-fluorocytidine
  modified_base (2)..(2): um
  misc_feature (2)..(3): 5'-phosphonothioate
  modified_base (3)..(3): 2'-deoxy-2'-fluoroguanosine
  modified_base (4)..(4): cm
  modified_base (5)..(5): 2'-deoxy-2'-fluorocytidine
  modified_base (6)..(6): 2'-O-methyladenosine
  modified_base (7)..(7): 2'-deoxy-2'-fluorouridine
  modified_base (8)..(8): gm
  modified_base (9)..(9): 2'-deoxy-2'-fluorocytidine
  modified_base (10)..(10): cm
  modified_base (11)..(11): 2'-deoxy-2'-fluoroadenosine
  modified_base (12)..(12): 2'-deoxy-2'-fluoroadenosine
  modified_base (13)..(13): gm
  modified_base (14)..(14): 2'-deoxy-2'-fluorouridine
  modified_base (15)..(15): um
  modified_base (16)..(16): 2'-deoxy-2'-fluoroguanosine
  modified_base (17)..(17): um
  modified_base (18)..(18): 2'-deoxy-2'-fluoroadenosine
  modified_base (19)..(19): 2'-O-methyladenosine
  modified_base (20)..(20): 2'-deoxy-2'-fluoroadenosine
  modified_base (21)..(21): gm
cugccaugccaaguuguaaag

SEQ ID NO: 5864 - RNA, 21 nt, Artificial Sequence
  siRNA sense strand against b2GPI
  modified_base (1)..(1): 2'-deoxy-2'-fluoroguanosine
  modified_base (2)..(2): cm
  misc_feature (2)..(3): 5'-phosphonothioate
  modified_base (3)..(3): 2'-deoxy-2'-fluorocytidine
  modified_base (4)..(4): 2'-O-methyladenosine
  modified_base (5)..(5): 2'-deoxy-2'-fluorouridine
  modified_base (6)..(6): gm
  modified_base (7)..(7): 2'-deoxy-2'-fluorocytidine
  modified_base (8)..(8): cm
  modified_base (9)..(9): 2'-deoxy-2'-fluoroadenosine
  modified_base (10)..(10): 2'-O-methyladenosine
  modified_base (11)..(11): 2'-deoxy-2'-fluoroguanosine
  modified_base (12)..(12): 2'-deoxy-2'-fluorouridine
  modified_base (13)..(13): um
  modified_base (14)..(14): 2'-deoxy-2'-fluoroguanosine
  modified_base (15)..(15): um
  modified_base (16)..(16): 2'-deoxy-2'-fluoroadenosine
  modified_base (17)..(17): 2'-O-methyladenosine
  modified_base (18)..(18): 2'-deoxy-2'-fluoroadenosine
  modified_base (19)..(19): gm
  modified_base (20)..(20): 2'-deoxy-2'-fluorocytidine
  modified_base (21)..(21): 2'-O-methyladenosine
gccaugccaaguuguaaagca

SEQ ID NO: 5865 - RNA, 21 nt, Artificial Sequence
  siRNA sense strand against b2GPI
  modified_base (1)..(1): 2'-deoxy-2'-fluorocytidine
  modified_base (2)..(2): cm
  misc_feature (2)..(3): 5'-phosphonothioate
  modified_base (3)..(3): 2'-deoxy-2'-fluoroadenosine
  modified_base (4)..(4): um
  modified_base (5)..(5): 2'-deoxy-2'-fluoroguanosine
  modified_base (6)..(6): cm
  modified_base (7)..(7): 2'-deoxy-2'-fluorocytidine
  modified_base (8)..(8): 2'-O-methyladenosine
  modified_base (9)..(9): 2'-deoxy-2'-fluoroadenosine
  modified_base (10)..(10): gm
  modified_base (11)..(11): 2'-deoxy-2'-fluorouridine
  modified_base (12)..(12): 2'-deoxy-2'-fluorouridine
  modified_base (13)..(13): gm
  modified_base (14)..(14): 2'-deoxy-2'-fluorouridine
  modified_base (15)..(15): 2'-O-methyladenosine
  modified_base (16)..(16): 2'-deoxy-2'-fluoroadenosine
  modified_base (17)..(17): 2'-O-methyladenosine
  modified_base (18)..(18): 2'-deoxy-2'-fluoroguanosine
  modified_base (19)..(19): cm
  modified_base (20)..(20): 2'-deoxy-2'-fluoroadenosine
  modified_base (21)..(21): um
ccaugccaaguuguaaagcau

SEQ ID NO: 5866 - RNA, 21 nt, Artificial Sequence
  siRNA sense strand against b2GPI
  modified_base (1)..(1): 2'-deoxy-2'-fluorocytidine
  modified_base (2)..(2): 2'-O-methyladenosine
  misc_feature (2)..(3): 5'-phosphonothioate
  modified_base (3)..(3): 2'-deoxy-2'-fluorouridine
  modified_base (4)..(4): gm
  modified_base (5)..(5): 2'-deoxy-2'-fluorocytidine
  modified_base (6)..(6): cm
  modified_base (7)..(7): 2'-deoxy-2'-fluoroadenosine
  modified_base (8)..(8): 2'-O-methyladenosine
  modified_base (9)..(9): 2'-deoxy-2'-fluoroguanosine
  modified_base (10)..(10): um
  modified_base (11)..(11): 2'-deoxy-2'-fluorouridine
  modified_base (12)..(12): 2'-deoxy-2'-fluoroguanosine
  modified_base (13)..(13): um
  modified_base (14)..(14): 2'-deoxy-2'-fluoroadenosine
  modified_base (15)..(15): 2'-O-methyladenosine
  modified_base (16)..(16): 2'-deoxy-2'-fluoroadenosine
  modified_base (17)..(17): gm
  modified_base (18)..(18): 2'-deoxy-2'-fluorocytidine
  modified_base (19)..(19): 2'-O-methyladenosine
  modified_base (20)..(20): 2'-deoxy-2'-fluorouridine
  modified_base (21)..(21): cm
caugccaaguuguaaagcauc

SEQ ID NO: 5867 - RNA, 21 nt, Artificial Sequence
  siRNA sense strand against b2GPI
  modified_base (1)..(1): 2'-deoxy-2'-fluoroadenosine
  modified_base (2)..(2): um
  misc_feature (2)..(3): 5'-phosphonothioate
  modified_base (3)..(3): 2'-deoxy-2'-fluoroguanosine
  modified_base (4)..(4): cm
  modified_base (5)..(5): 2'-deoxy-2'-fluorocytidine
  modified_base (6)..(6): 2'-O-methyladenosine
  modified_base (7)..(7): 2'-deoxy-2'-fluoroadenosine
  modified_base (8)..(8): gm
  modified_base (9)..(9): 2'-deoxy-2'-fluorouridine
  modified_base (10)..(10): um
  modified_base (11)..(11): 2'-deoxy-2'-fluoroguanosine
  modified_base (12)..(12): 2'-deoxy-2'-fluorouridine
  modified_base (13)..(13): 2'-O-methyladenosine
  modified_base (14)..(14): 2'-deoxy-2'-fluoroadenosine
  modified_base (15)..(15): 2'-O-methyladenosine
  modified_base (16)..(16): 2'-deoxy-2'-fluoroguanosine
  modified_base (17)..(17): cm
  modified_base (18)..(18): 2'-deoxy-2'-fluoroadenosine
  modified_base (19)..(19): um
  modified_base (20)..(20): 2'-deoxy-2'-fluorocytidine
  modified_base (21)..(21): um
augccaaguuguaaagcaucu

SEQ ID NO: 5868 - RNA, 21 nt, Artificial Sequence
  siRNA sense strand against b2GPI
  modified_base (1)..(1): 2'-deoxy-2'-fluorouridine
  modified_base (2)..(2): gm
  misc_feature (2)..(3): 5'-phosphonothioate
  modified_base (3)..(3): 2'-deoxy-2'-fluorocytidine
  modified_base (4)..(4): cm
  modified_base (5)..(5): 2'-deoxy-2'-fluoroadenosine
  modified_base (6)..(6): 2'-O-methyladenosine
  modified_base (7)..(7): 2'-deoxy-2'-fluoroguanosine
  modified_base (8)..(8): um
  modified_base (9)..(9): 2'-deoxy-2'-fluorouridine
  modified_base (10)..(10): gm
  modified_base (11)..(11): 2'-deoxy-2'-fluorouridine
  modified_base (12)..(12): 2'-deoxy-2'-fluoroadenosine
  modified_base (13)..(13): 2'-O-methyladenosine
  modified_base (14)..(14): 2'-deoxy-2'-fluoroadenosine
  modified_base (15)..(15): gm
  modified_base (16)..(16): 2'-deoxy-2'-fluorocytidine
  modified_base (17)..(17): 2'-O-methyladenosine
  modified_base (18)..(18): 2'-deoxy-2'-fluorouridine
  modified_base (19)..(19): cm
  modified_base (20)..(20): 2'-deoxy-2'-fluorouridine
  modified_base (21)..(21): um
ugccaaguuguaaagcaucuu

SEQ ID NO: 5869 - RNA, 21 nt, Artificial Sequence
  siRNA sense strand against b2GPI
  modified_base (1)..(1): 2'-deoxy-2'-fluoroguanosine
  modified_base (2)..(2): cm
  misc_feature (2)..(3): 5'-phosphonothioate
  modified_base (3)..(3): 2'-deoxy-2'-fluorocytidine
  modified_base (4)..(4): 2'-O-methyladenosine
  modified_base (5)..(5): 2'-deoxy-2'-fluoroadenosine
  modified_base (6)..(6): gm
  modified_base (7)..(7): 2'-deoxy-2'-fluorouridine
  modified_base (8)..(8): um
  modified_base (9)..(9): 2'-deoxy-2'-fluoroguanosine
  modified_base (10)..(10): um
  modified_base (11)..(11): 2'-deoxy-2'-fluoroadenosine
  modified_base (12)..(12): 2'-deoxy-2'-fluoroadenosine
  modified_base (13)..(13): 2'-O-methyladenosine
  modified_base (14)..(14): 2'-deoxy-2'-fluoroguanosine
  modified_base (15)..(15): cm
  modified_base (16)..(16): 2'-deoxy-2'-fluoroadenosine
  modified_base (17)..(17): um
  modified_base (18)..(18): 2'-deoxy-2'-fluorocytidine
  modified_base (19)..(19): um
  modified_base (20)..(20): 2'-deoxy-2'-fluorouridine
  modified_base (21)..(21): gm
gccaaguuguaaagcaucuug

SEQ ID NO: 5870 - RNA, 21 nt, Artificial Sequence
  siRNA sense strand against b2GPI
  modified_base (1)..(1): 2'-deoxy-2'-fluorocytidine
  modified_base (2)..(2): cm
  misc_feature (2)..(3): 5'-phosphonothioate
  modified_base (3)..(3): 2'-deoxy-2'-fluoroadenosine
  modified_base (4)..(4): 2'-O-methyladenosine
  modified_base (5)..(5): 2'-deoxy-2'-fluoroguanosine
  modified_base (6)..(6): um
  modified_base (7)..(7): 2'-deoxy-2'-fluorouridine
  modified_base (8)..(8): gm
  modified_base (9)..(9): 2'-deoxy-2'-fluorouridine
  modified_base (10)..(10): 2'-O-methyladenosine
  modified_base (11)..(11): 2'-deoxy-2'-fluoroadenosine
  modified_base (12)..(12): 2'-deoxy-2'-fluoroadenosine
  modified_base (13)..(13): gm
  modified_base (14)..(14): 2'-deoxy-2'-fluorocytidine
  modified_base (15)..(15): 2'-O-methyladenosine
  modified_base (16)..(16): 2'-deoxy-2'-fluorouridine
  modified_base (17)..(17): cm
  modified_base (18)..(18): 2'-deoxy-2'-fluorouridine
  modified_base (19)..(19): um
  modified_base (20)..(20): 2'-deoxy-2'-fluoroguanosine
  modified_base (21)..(21): um
ccaaguuguaaagcaucuugu

SEQ ID NO: 5871 - RNA, 21 nt, Artificial Sequence
  siRNA sense strand against b2GPI
  modified_base (1)..(1): 2'-deoxy-2'-fluorocytidine
  modified_base (2)..(2): 2'-O-methyladenosine
  misc_feature (2)..(3): 5'-phosphonothioate
  modified_base (3)..(3): 2'-deoxy-2'-fluoroadenosine
  modified_base (4)..(4): gm
  modified_base (5)..(5): 2'-deoxy-2'-fluorouridine
  modified_base (6)..(6): um
  modified_base (7)..(7): 2'-deoxy-2'-fluoroguanosine
  modified_base (8)..(8): um
  modified_base (9)..(9): 2'-deoxy-2'-fluoroadenosine
  modified_base (10)..(10): 2'-O-methyladenosine
  modified_base (11)..(11): 2'-deoxy-2'-fluoroadenosine
  modified_base (12)..(12): 2'-deoxy-2'-fluoroguanosine
  modified_base (13)..(13): cm
  modified_base (14)..(14): 2'-deoxy-2'-fluoroadenosine
  modified_base (15)..(15): um
  modified_base (16)..(16): 2'-deoxy-2'-fluorocytidine
  modified_base (17)..(17): um
  modified_base (18)..(18): 2'-deoxy-2'-fluorouridine
  modified_base (19)..(19): gm
  modified_base (20)..(20): 2'-deoxy-2'-fluorouridine
  modified_base (21)..(21): 2'-O-methyladenosine
caaguuguaaagcaucuugua

SEQ ID NO: 5872 - RNA, 21 nt, Artificial Sequence
  siRNA sense strand against b2GPI
  modified_base (1)..(1): 2'-deoxy-2'-fluoroadenosine
  modified_base (2)..(2): 2'-O-methyladenosine
  misc_feature (2)..(3): 5'-phosphonothioate
  modified_base (3)..(3): 2'-deoxy-2'-fluoroguanosine
  modified_base (4)..(4): um
  modified_base (5)..(5): 2'-deoxy-2'-fluorouridine
  modified_base (6)..(6): gm
  modified_base (7)..(7): 2'-deoxy-2'-fluorouridine
  modified_base (8)..(8): 2'-O-methyladenosine
  modified_base (9)..(9): 2'-deoxy-2'-fluoroadenosine
  modified_base (10)..(10): 2'-O-methyladenosine
  modified_base (11)..(11): 2'-deoxy-2'-fluoroguanosine
  modified_base (12)..(12): 2'-deoxy-2'-fluorocytidine
  modified_base (13)..(13): 2'-O-methyladenosine
  modified_base (14)..(14): 2'-deoxy-2'-fluorouridine
  modified_base (15)..(15): cm
  modified_base (16)..(16): 2'-deoxy-2'-fluorouridine
  modified_base (17)..(17): um
  modified_base (18)..(18): 2'-deoxy-2'-fluoroguanosine
  modified_base (19)..(19): um
  modified_base (20)..(20): 2'-deoxy-2'-fluoroadenosine
  modified_base (21)..(21): 2'-O-methyladenosine
aaguuguaaagcaucuuguaa

SEQ ID NO: 5873 - RNA, 21 nt, Artificial Sequence
  siRNA sense strand against b2GPI
  modified_base (1)..(1): 2'-deoxy-2'-fluoroadenosine
  modified_base (2)..(2): gm
  misc_feature (2)..(3): 5'-phosphonothioate
  modified_base (3)..(3): 2'-deoxy-2'-fluorouridine
  modified_base (4)..(4): um
  modified_base (5)..(5): 2'-deoxy-2'-fluoroguanosine
  modified_base (6)..(6): um
  modified_base (7)..(7): 2'-deoxy-2'-fluoroadenosine
  modified_base (8)..(8): 2'-O-methyladenosine
  modified_base (9)..(9): 2'-deoxy-2'-fluoroadenosine
  modified_base (10)..(10): gm
  modified_base (11)..(11): 2'-deoxy-2'-fluorocytidine
  modified_base (12)..(12): 2'-deoxy-2'-fluoroadenosine
  modified_base (13)..(13): um
  modified_base (14)..(14): 2'-deoxy-2'-fluorocytidine
  modified_base (15)..(15): um
  modified_base (16)..(16): 2'-deoxy-2'-fluorouridine
  modified_base (17)..(17): gm
  modified_base (18)..(18): 2'-deoxy-2'-fluorouridine
  modified_base (19)..(19): 2'-O-methyladenosine
  modified_base (20)..(20): 2'-deoxy-2'-fluoroadenosine
  modified_base (21)..(21): 2'-O-methyladenosine
aguuguaaagcaucuuguaaa

SEQ ID NO: 5874 - RNA, 21 nt, Artificial Sequence
  siRNA sense strand against b2GPI
  modified_base (1)..(1): 2'-deoxy-2'-fluoroguanosine
  modified_base (2)..(2): um
  misc_feature (2)..(3): 5'-phosphonothioate
  modified_base (3)..(3): 2'-deoxy-2'-fluorouridine
  modified_base (4)..(4): gm
  modified_base (5)..(5): 2'-deoxy-2'-fluorouridine
  modified_base (6)..(6): 2'-O-methyladenosine
  modified_base (7)..(7): 2'-deoxy-2'-fluoroadenosine
  modified_base (8)..(8): 2'-O-methyladenosine
  modified_base (9)..(9): 2'-deoxy-2'-fluoroguanosine
  modified_base (10)..(10): cm
  modified_base (11)..(11): 2'-deoxy-2'-fluoroadenosine
  modified_base (12)..(12): 2'-deoxy-2'-fluorouridine
  modified_base (13)..(13): cm
  modified_base (14)..(14): 2'-deoxy-2'-fluorouridine
  modified_base (15)..(15): um
  modified_base (16)..(16): 2'-deoxy-2'-fluoroguanosine
  modified_base (17)..(17): um
  modified_base (18)..(18): 2'-deoxy-2'-fluoroadenosine
  modified_base (19)..(19): 2'-O-methyladenosine
  modified_base (20)..(20): 2'-deoxy-2'-fluoroadenosine
  modified_base (21)..(21): gm
guuguaaagcaucuuguaaag

SEQ ID NO: 5875 - RNA, 21 nt, Artificial Sequence
  siRNA sense strand against b2GPI
  modified_base (1)..(1): 2'-deoxy-2'-fluorouridine
  modified_base (2)..(2): gm
  misc_feature (2)..(3): 5'-phosphonothioate
  modified_base (3)..(3): 2'-deoxy-2'-fluorouridine
  modified_base (4)..(4): 2'-O-methyladenosine
  modified_base (5)..(5): 2'-deoxy-2'-fluoroadenosine
  modified_base (6)..(6): 2'-O-methyladenosine
  modified_base (7)..(7): 2'-deoxy-2'-fluoroguanosine
  modified_base (8)..(8): cm
  modified_base (9)..(9): 2'-deoxy-2'-fluoroadenosine
  modified_base (10)..(10): um
  modified_base (11)..(11): 2'-deoxy-2'-fluorocytidine
  modified_base (12)..(12): 2'-deoxy-2'-fluorouridine
  modified_base (13)..(13): um
  modified_base (14)..(14): 2'-deoxy-2'-fluoroguanosine
  modified_base (15)..(15): um
  modified_base (16)..(16): 2'-deoxy-2'-fluoroadenosine
  modified_base (17)..(17): 2'-O-methyladenosine
  modified_base (18)..(18): 2'-deoxy-2'-fluoroadenosine
  modified_base (19)..(19): gm
  modified_base (20)..(20): 2'-deoxy-2'-fluorouridine
  modified_base (21)..(21): 2'-O-methyladenosine
uguaaagcaucuuguaaagua

SEQ ID NO: 5876 - RNA, 21 nt, Artificial Sequence
  siRNA sense strand against b2GPI
  modified_base (1)..(1): 2'-deoxy-2'-fluoroguanosine
  modified_base (2)..(2): um
  misc_feature (2)..(3): 5'-phosphonothioate
  modified_base (3)..(3): 2'-deoxy-2'-fluoroadenosine
  modified_base (4)..(4): 2'-O-methyladenosine
  modified_base (5)..(5): 2'-deoxy-2'-fluoroadenosine
  modified_base (6)..(6): gm
  modified_base (7)..(7): 2'-deoxy-2'-fluorocytidine
  modified_base (8)..(8): 2'-O-methyladenosine
  modified_base (9)..(9): 2'-deoxy-2'-fluorouridine
  modified_base (10)..(10): cm
  modified_base (11)..(11): 2'-deoxy-2'-fluorouridine
  modified_base (12)..(12): 2'-deoxy-2'-fluorouridine
  modified_base (13)..(13): gm
  modified_base (14)..(14): 2'-deoxy-2'-fluorouridine
  modified_base (15)..(15): 2'-O-methyladenosine
  modified_base (16)..(16): 2'-deoxy-2'-fluoroadenosine
  modified_base (17)..(17): 2'-O-methyladenosine
  modified_base (18)..(18): 2'-deoxy-2'-fluoroguanosine
  modified_base (19)..(19): um
  modified_base (20)..(20): 2'-deoxy-2'-fluoroadenosine
  modified_base (21)..(21): cm
guaaagcaucuuguaaaguac

SEQ ID NO: 5877 - RNA, 21 nt, Artificial Sequence
  siRNA sense strand against b2GPI
  modified_base (1)..(1): 2'-deoxy-2'-fluoroadenosine
  modified_base (2)..(2): 2'-O-methyladenosine
  misc_feature (2)..(3): 5'-phosphonothioate
  modified_base (3)..(3): 2'-deoxy-2'-fluoroadenosine
  modified_base (4)..(4): gm
  modified_base (5)..(5): 2'-deoxy-2'-fluorocytidine
  modified_base (6)..(6): 2'-O-methyladenosine
  modified_base (7)..(7): 2'-deoxy-2'-fluorouridine
  modified_base (8)..(8): cm
  modified_base (9)..(9): 2'-deoxy-2'-fluorouridine
  modified_base (10)..(10): um
  modified_base (11)..(11): 2'-deoxy-2'-fluoroguanosine
  modified_base (12)..(12): 2'-deoxy-2'-fluorouridine
  modified_base (13)..(13): 2'-O-methyladenosine
  modified_base (14)..(14): 2'-deoxy-2'-fluoroadenosine
  modified_base (15)..(15): 2'-O-methyladenosine
  modified_base (16)..(16): 2'-deoxy-2'-fluoroguanosine
  modified_base (17)..(17): um
  modified_base (18)..(18): 2'-deoxy-2'-fluoroadenosine
  modified_base (19)..(19): cm
  modified_base (20)..(20): 2'-deoxy-2'-fluorocytidine
  modified_base (21)..(21): um
aaagcaucuuguaaaguaccu

SEQ ID NO: 5878 - RNA, 21 nt, Artificial Sequence
  siRNA sense strand against b2GPI
  modified_base (1)..(1): 2'-deoxy-2'-fluoroadenosine
  modified_base (2)..(2): gm
  misc_feature (2)..(3): 5'-phosphonothioate
  modified_base (3)..(3): 2'-deoxy-2'-fluorocytidine
  modified_base (4)..(4): 2'-O-methyladenosine
  modified_base (5)..(5): 2'-deoxy-2'-fluorouridine
  modified_base (6)..(6): cm
  modified_base (7)..(7): 2'-deoxy-2'-fluorouridine
  modified_base (8)..(8): um
  modified_base (9)..(9): 2'-deoxy-2'-fluoroguanosine
  modified_base (10)..(10): um
  modified_base (11)..(11): 2'-deoxy-2'-fluoroadenosine
  modified_base (12)..(12): 2'-deoxy-2'-fluoroadenosine
  modified_base (13)..(13): 2'-O-methyladenosine
  modified_base (14)..(14): 2'-deoxy-2'-fluoroguanosine
  modified_base (15)..(15): um
  modified_base (16)..(16): 2'-deoxy-2'-fluoroadenosine
  modified_base (17)..(17): cm
  modified_base (18)..(18): 2'-deoxy-2'-fluorocytidine
  modified_base (19)..(19): um
  modified_base (20)..(20): 2'-deoxy-2'-fluoroguanosine
  modified_base (21)..(21): um
agcaucuuguaaaguaccugu

SEQ ID NO: 5879 - RNA, 21 nt, Artificial Sequence
  siRNA sense strand against b2GPI
  modified_base (1)..(1): 2'-deoxy-2'-fluoroadenosine
  modified_base (2)..(2): um
  misc_feature (2)..(3): 5'-phosphonothioate
  modified_base (3)..(3): 2'-deoxy-2'-fluorocytidine
  modified_base (4)..(4): um
  modified_base (5)..(5): 2'-deoxy-2'-fluorouridine
  modified_base (6)..(6): gm
  modified_base (7)..(7): 2'-deoxy-2'-fluorouridine
  modified_base (8)..(8): 2'-O-methyladenosine
  modified_base (9)..(9): 2'-deoxy-2'-fluoroadenosine
  modified_base (10)..(10): 2'-O-methyladenosine
  modified_base (11)..(11): 2'-deoxy-2'-fluoroguanosine
  modified_base (12)..(12): 2'-deoxy-2'-fluorouridine
  modified_base (13)..(13): 2'-O-methyladenosine
  modified_base (14)..(14): 2'-deoxy-2'-fluorocytidine
  modified_base (15)..(15): cm
  modified_base (16)..(16): 2'-deoxy-2'-fluorouridine
  modified_base (17)..(17): gm
  modified_base (18)..(18): 2'-deoxy-2'-fluorouridine
  modified_base (19)..(19): gm
  modified_base (20)..(20): 2'-deoxy-2'-fluoroadenosine
  modified_base (21)..(21): 2'-O-methyladenosine
aucuuguaaaguaccugugaa

SEQ ID NO: 5880 - RNA, 21 nt, Artificial Sequence
  siRNA sense strand against b2GPI
  modified_base (1)..(1): 2'-deoxy-2'-fluorouridine
  modified_base (2)..(2): cm
  misc_feature (2)..(3): 5'-phosphonothioate
  modified_base (3)..(3): 2'-deoxy-2'-fluorouridine
  modified_base (4)..(4): um
  modified_base (5)..(5): 2'-deoxy-2'-fluoroguanosine
  modified_base (6)..(6): um
  modified_base (7)..(7): 2'-deoxy-2'-fluoroadenosine
  modified_base (8)..(8): 2'-O-methyladenosine
  modified_base (9)..(9): 2'-deoxy-2'-fluoroadenosine
  modified_base (10)..(10): gm
  modified_base (11)..(11): 2'-deoxy-2'-fluorouridine
  modified_base (12)..(12): 2'-deoxy-2'-fluoroadenosine
  modified_base (13)..(13): cm
  modified_base (14)..(14): 2'-deoxy-2'-fluorocytidine
  modified_base (15)..(15): um
  modified_base (16)..(16): 2'-deoxy-2'-fluoroguanosine
  modified_base (17)..(17): um
  modified_base (18)..(18): 2'-deoxy-2'-fluoroguanosine
  modified_base (19)..(19): 2'-O-methyladenosine
  modified_base (20)..(20): 2'-deoxy-2'-fluoroadenosine
  modified_base (21)..(21): 2'-O-methyladenosine
ucuuguaaaguaccugugaaa

SEQ ID NO: 5881 - RNA, 21 nt, Artificial Sequence
  siRNA sense strand against b2GPI
  modified_base (1)..(1): 2'-deoxy-2'-fluorocytidine
  modified_base (2)..(2): um
  misc_feature (2)..(3): 5'-phosphonothioate
  modified_base (3)..(3): 2'-deoxy-2'-fluorouridine
  modified_base (4)..(4): gm
  modified_base (5)..(5): 2'-deoxy-2'-fluorouridine
  modified_base (6)..(6): 2'-O-methyladenosine
  modified_base (7)..(7): 2'-deoxy-2'-fluoroadenosine
  modified_base (8)..(8): 2'-O-methyladenosine
  modified_base (9)..(9): 2'-deoxy-2'-fluoroguanosine
  modified_base (10)..(10): um
  modified_base (11)..(11): 2'-deoxy-2'-fluoroadenosine
  modified_base (12)..(12): 2'-deoxy-2'-fluorocytidine
  modified_base (13)..(13): cm
  modified_base (14)..(14): 2'-deoxy-2'-fluorouridine
  modified_base (15)..(15): gm
  modified_base (16)..(16): 2'-deoxy-2'-fluorouridine
  modified_base (17)..(17): gm
  modified_base (18)..(18): 2'-deoxy-2'-fluoroadenosine
  modified_base (19)..(19): 2'-O-methyladenosine
  modified_base (20)..(20): 2'-deoxy-2'-fluoroadenosine
  modified_base (21)..(21): 2'-O-methyladenosine
cuuguaaaguaccugugaaaa

SEQ ID NO: 5882 - RNA, 21 nt, Artificial Sequence
  siRNA sense strand against b2GPI
  modified_base (1)..(1): 2'-deoxy-2'-fluoroadenosine
  modified_base (2)..(2): 2'-O-methyladenosine
  misc_feature (2)..(3): 5'-phosphonothioate
  modified_base (3)..(3): 2'-deoxy-2'-fluoroadenosine
  modified_base (4)..(4): gm
  modified_base (5)..(5): 2'-deoxy-2'-fluorouridine
  modified_base (6)..(6): 2'-O-methyladenosine
  modified_base (7)..(7): 2'-deoxy-2'-fluorocytidine
  modified_base (8)..(8): cm
  modified_base (9)..(9): 2'-deoxy-2'-fluorouridine
  modified_base (10)..(10): gm
  modified_base (11)..(11): 2'-deoxy-2'-fluorouridine
  modified_base (12)..(12): 2'-deoxy-2'-fluoroguanosine
  modified_base (13)..(13): 2'-O-methyladenosine
  modified_base (14)..(14): 2'-deoxy-2'-fluoroadenosine
  modified_base (15)..(15): 2'-O-methyladenosine
  modified_base (16)..(16): 2'-deoxy-2'-fluoroadenosine
  modified_base (17)..(17): 2'-O-methyladenosine
  modified_base (18)..(18): 2'-deoxy-2'-fluoroadenosine
  modified_base (19)..(19): gm
  modified_base (20)..(20): 2'-deoxy-2'-fluorocytidine
  modified_base (21)..(21): cm
aaaguaccugugaaaaaagcc

SEQ ID NO: 5883 - RNA, 21 nt, Artificial Sequence
  siRNA sense strand against b2GPI
  modified_base (1)..(1): 2'-deoxy-2'-fluoroadenosine
  modified_base (2)..(2): 2'-O-methyladenosine
  misc_feature (2)..(3): 5'-phosphonothioate
  modified_base (3)..(3): 2'-deoxy-2'-fluoroguanosine
  modified_base (4)..(4): um
  modified_base (5)..(5): 2'-deoxy-2'-fluoroadenosine
  modified_base (6)..(6): cm
  modified_base (7)..(7): 2'-deoxy-2'-fluorocytidine
  modified_base (8)..(8): um
  modified_base (9)..(9): 2'-deoxy-2'-fluoroguanosine
  modified_base (10)..(10): um
  modified_base (11)..(11): 2'-deoxy-2'-fluoroguanosine
  modified_base (12)..(12): 2'-deoxy-2'-fluoroadenosine
  modified_base (13)..(13): 2'-O-methyladenosine
  modified_base (14)..(14): 2'-deoxy-2'-fluoroadenosine
  modified_base (15)..(15): 2'-O-methyladenosine
  modified_base (16)..(16): 2'-deoxy-2'-fluoroadenosine
  modified_base (17)..(17): 2'-O-methyladenosine
  modified_base (18)..(18): 2'-deoxy-2'-fluoroguanosine
  modified_base (19)..(19): cm
  modified_base (20)..(20): 2'-deoxy-2'-fluorocytidine
  modified_base (21)..(21): 2'-O-methyladenosine
aaguaccugugaaaaaagcca

SEQ ID NO: 5884 - RNA, 21 nt, Artificial Sequence
  siRNA sense strand against b2GPI
  modified_base (1)..(1): 2'-deoxy-2'-fluoroadenosine
  modified_base (2)..(2): gm
  misc_feature (2)..(3): 5'-phosphonothioate
  modified_base (3)..(3): 2'-deoxy-2'-fluorouridine
  modified_base (4)..(4): 2'-O-methyladenosine
  modified_base (5)..(5): 2'-deoxy-2'-fluorocytidine
  modified_base (6)..(6): cm
  modified_base (7)..(7): 2'-deoxy-2'-fluorouridine
  modified_base (8)..(8): gm
  modified_base (9)..(9): 2'-deoxy-2'-fluorouridine
  modified_base (10)..(10): gm
  modified_base (11)..(11): 2'-deoxy-2'-fluoroadenosine
  modified_base (12)..(12): 2'-deoxy-2'-fluoroadenosine
  modified_base (13)..(13): 2'-O-methyladenosine
  modified_base (14)..(14): 2'-deoxy-2'-fluoroadenosine
  modified_base (15)..(15): 2'-O-methyladenosine
  modified_base (16)..(16): 2'-deoxy-2'-fluoroadenosine
  modified_base (17)..(17): gm
  modified_base (18)..(18): 2'-deoxy-2'-fluorocytidine
  modified_base (19)..(19): cm
  modified_base (20)..(20): 2'-deoxy-2'-fluoroadenosine
  modified_base (21)..(21): cm
aguaccugugaaaaaagccac

SEQ ID NO: 5885 - RNA, 21 nt, Artificial Sequence
  siRNA sense strand against b2GPI
  modified_base (1)..(1): 2'-deoxy-2'-fluoroguanosine
  modified_base (2)..(2): um
  misc_feature (2)..(3): 5'-phosphonothioate
  modified_base (3)..(3): 2'-deoxy-2'-fluoroadenosine
  modified_base (4)..(4): cm
  modified_base (5)..(5): 2'-deoxy-2'-fluorocytidine
  modified_base (6)..(6): um
  modified_base (7)..(7): 2'-deoxy-2'-fluoroguanosine
  modified_base (8)..(8): um
  modified_base (9)..(9): 2'-deoxy-2'-fluoroguanosine
  modified_base (10)..(10): 2'-O-methyladenosine
  modified_base (11)..(11): 2'-deoxy-2'-fluoroadenosine
  modified_base (12)..(12): 2'-deoxy-2'-fluoroadenosine
  modified_base (13)..(13): 2'-O-methyladenosine
  modified_base (14)..(14): 2'-deoxy-2'-fluoroadenosine
  modified_base (15)..(15): 2'-O-methyladenosine
  modified_base (16)..(16): 2'-deoxy-2'-fluoroguanosine
  modified_base (17)..(17): cm
  modified_base (18)..(18): 2'-deoxy-2'-fluorocytidine
  modified_base (19)..(19): 2'-O-methyladenosine
  modified_base (20)..(20): 2'-deoxy-2'-fluorocytidine
  modified_base (21)..(21): um
guaccugugaaaaaagccacu

SEQ ID NO: 5886 - RNA, 21 nt, Artificial Sequence
  siRNA sense strand against b2GPI
  modified_base (1)..(1): 2'-deoxy-2'-fluoroadenosine
  modified_base (2)..(2): cm
  misc_feature (2)..(3): 5'-phosphonothioate
  modified_base (3)..(3): 2'-deoxy-2'-fluorocytidine
  modified_base (4)..(4): um
  modified_base (5)..(5): 2'-deoxy-2'-fluoroguanosine
  modified_base (6)..(6): um
  modified_base (7)..(7): 2'-deoxy-2'-fluoroguanosine
  modified_base (8)..(8): 2'-O-methyladenosine
  modified_base (9)..(9): 2'-deoxy-2'-fluoroadenosine
  modified_base (10)..(10): 2'-O-methyladenosine
  modified_base (11)..(11): 2'-deoxy-2'-fluoroadenosine
  modified_base (12)..(12): 2'-deoxy-2'-fluoroadenosine
  modified_base (13)..(13): 2'-O-methyladenosine
  modified_base (14)..(14): 2'-deoxy-2'-fluoroguanosine
  modified_base (15)..(15): cm
  modified_base (16)..(16): 2'-deoxy-2'-fluorocytidine
  modified_base (17)..(17): 2'-O-methyladenosine
  modified_base (18)..(18): 2'-deoxy-2'-fluorocytidine
  modified_base (19)..(19): um
  modified_base (20)..(20): 2'-deoxy-2'-fluoroguanosine
  modified_base (21)..(21): um
accugugaaaaaagccacugu

SEQ ID NO: 5887 - RNA, 21 nt, Artificial Sequence
  siRNA sense strand against b2GPI
  modified_base (1)..(1): 2'-deoxy-2'-fluorocytidine
  modified_base (2)..(2): cm
  misc_feature (2)..(3): 5'-phosphonothioate
  modified_base (3)..(3): 2'-deoxy-2'-fluorouridine
  modified_base (4)..(4): gm
  modified_base (5)..(5): 2'-deoxy-2'-fluorouridine
  modified_base (6)..(6): gm
  modified_base (7)..(7): 2'-deoxy-2'-fluoroadenosine
  modified_base (8)..(8): 2'-O-methyladenosine
  modified_base (9)..(9): 2'-deoxy-2'-fluoroadenosine
  modified_base (10)..(10): 2'-O-methyladenosine
  modified_base (11)..(11): 2'-deoxy-2'-fluoroadenosine
  modified_base (12)..(12): 2'-deoxy-2'-fluoroadenosine
  modified_base (13)..(13): gm
  modified_base (14)..(14): 2'-deoxy-2'-fluorocytidine
  modified_base (15)..(15): cm
  modified_base (16)..(16): 2'-deoxy-2'-fluoroadenosine
  modified_base (17)..(17): cm
  modified_base (18)..(18): 2'-deoxy-2'-fluorouridine
  modified_base (19)..(19): gm
  modified_base (20)..(20): 2'-deoxy-2'-fluorouridine
  modified_base (21)..(21): gm
ccugugaaaaaagccacugug

SEQ ID NO: 5888 - RNA, 21 nt, Artificial Sequence
  siRNA sense strand against b2GPI
  modified_base (1)..(1): 2'-deoxy-2'-fluorocytidine
  modified_base (2)..(2): um
  misc_feature (2)..(3): 5'-phosphonothioate
  modified_base (3)..(3): 2'-deoxy-2'-fluoroguanosine
  modified_base (4)..(4): um
  modified_base (5)..(5): 2'-deoxy-2'-fluoroguanosine
  modified_base (6)..(6): 2'-O-methyladenosine
  modified_base (7)..(7): 2'-deoxy-2'-fluoroadenosine
  modified_base (8)..(8): 2'-O-methyladenosine
  modified_base (9)..(9): 2'-deoxy-2'-fluoroadenosine
  modified_base (10)..(10): 2'-O-methyladenosine
  modified_base (11)..(11): 2'-deoxy-2'-fluoroadenosine
  modified_base (12)..(12): 2'-deoxy-2'-fluoroguanosine
  modified_base (13)..(13): cm
  modified_base (14)..(14): 2'-deoxy-2'-fluorocytidine
  modified_base (15)..(15): 2'-O-methyladenosine
  modified_base (16)..(16): 2'-deoxy-2'-fluorocytidine
  modified_base (17)..(17): um
  modified_base (18)..(18): 2'-deoxy-2'-fluoroguanosine
  modified_base (19)..(19): um
  modified_base (20)..(20): 2'-deoxy-2'-fluoroguanosine
  modified_base (21)..(21): gm
cugugaaaaaagccacugugg

SEQ ID NO: 5889 - RNA, 21 nt, Artificial Sequence
  siRNA sense strand against b2GPI
  modified_base (1)..(1): 2'-deoxy-2'-fluorouridine
  modified_base (2)..(2): gm
  misc_feature (2)..(3): 5'-phosphonothioate
  modified_base (3)..(3): 2'-deoxy-2'-fluorouridine
  modified_base (4)..(4): gm
  modified_base (5)..(5): 2'-deoxy-2'-fluoroadenosine
  modified_base (6)..(6): 2'-O-methyladenosine
  modified_base (7)..(7): 2'-deoxy-2'-fluoroadenosine
  modified_base (8)..(8): 2'-O-methyladenosine
  modified_base (9)..(9): 2'-deoxy-2'-fluoroadenosine
  modified_base (10)..(10): 2'-O-methyladenosine
  modified_base (11)..(11): 2'-deoxy-2'-fluoroguanosine
  modified_base (12)..(12): 2'-deoxy-2'-fluorocytidine
  modified_base (13)..(13): cm
  modified_base (14)..(14): 2'-deoxy-2'-fluoroadenosine
  modified_base (15)..(15): cm
  modified_base (16)..(16): 2'-deoxy-2'-fluorouridine
  modified_base (17)..(17): gm
  modified_base (18)..(18): 2'-deoxy-2'-fluorouridine
  modified_base (19)..(19): gm
  modified_base (20)..(20): 2'-deoxy-2'-fluoroguanosine
  modified_base (21)..(21): um
ugugaaaaaagccacuguggu

SEQ ID NO: 5890 - RNA, 21 nt, Artificial Sequence
  siRNA sense strand against b2GPI
  modified_base (1)..(1): 2'-deoxy-2'-fluoroguanosine
  modified_base (2)..(2): um
  misc_feature (2)..(3): 5'-phosphonothioate
  modified_base (3)..(3): 2'-deoxy-2'-fluoroguanosine
  modified_base (4)..(4): 2'-O-methyladenosine
  modified_base (5)..(5): 2'-deoxy-2'-fluoroadenosine
  modified_base (6)..(6): 2'-O-methyladenosine
  modified_base (7)..(7): 2'-deoxy-2'-fluoroadenosine
  modified_base (8)..(8): 2'-O-methyladenosine
  modified_base (9)..(9): 2'-deoxy-2'-fluoroadenosine
  modified_base (10)..(10): gm
  modified_base (11)..(11): 2'-deoxy-2'-fluorocytidine
  modified_base (12)..(12): 2'-deoxy-2'-fluorocytidine
  modified_base (13)..(13): 2'-O-methyladenosine
  modified_base (14)..(14): 2'-deoxy-2'-fluorocytidine
  modified_base (15)..(15): um
  modified_base (16)..(16): 2'-deoxy-2'-fluoroguanosine
  modified_base (17)..(17): um
  modified_base (18)..(18): 2'-deoxy-2'-fluoroguanosine
  modified_base (19)..(19): gm
  modified_base (20)..(20): 2'-deoxy-2'-fluorouridine
  modified_base (21)..(21): gm
gugaaaaaagccacuguggug

SEQ ID NO: 5891 - RNA, 21 nt, Artificial Sequence
  siRNA sense strand against b2GPI
  modified_base (1)..(1): 2'-deoxy-2'-fluoroguanosine
  modified_base (2)..(2): 2'-O-methyladenosine
  misc_feature (2)..(3): 5'-phosphonothioate
  modified_base (3)..(3): 2'-deoxy-2'-fluoroadenosine
  modified_base (4)..(4): 2'-O-methyladenosine
  modified_base (5)..(5): 2'-deoxy-2'-fluoroadenosine
  modified_base (6)..(6): 2'-O-methyladenosine
  modified_base (7)..(7): 2'-deoxy-2'-fluoroadenosine
  modified_base (8)..(8): gm
  modified_base (9)..(9): 2'-deoxy-2'-fluorocytidine
  modified_base (10)..(10): cm
  modified_base (11)..(11): 2'-deoxy-2'-fluoroadenosine
  modified_base (12)..(12): 2'-deoxy-2'-fluorocytidine
  modified_base (13)..(13): um
  modified_base (14)..(14): 2'-deoxy-2'-fluoroguanosine
  modified_base (15)..(15): um
  modified_base (16)..(16): 2'-deoxy-2'-fluoroguanosine
  modified_base (17)..(17): gm
  modified_base (18)..(18): 2'-deoxy-2'-fluorouridine
  modified_base (19)..(19): gm
  modified_base (20)..(20): 2'-deoxy-2'-fluorouridine
  modified_base (21)..(21): 2'-O-methyladenosine
gaaaaaagccacuguggugua

SEQ ID NO: 5892 - RNA, 21 nt, Artificial Sequence
  siRNA sense strand against b2GPI
  modified_base (1)..(1): 2'-deoxy-2'-fluoroadenosine
  modified_base (2)..(2): 2'-O-methyladenosine
  misc_feature (2)..(3): 5'-phosphonothioate
  modified_base (3)..(3): 2'-deoxy-2'-fluoroadenosine
  modified_base (4)..(4): 2'-O-methyladenosine
  modified_base (5)..(5): 2'-deoxy-2'-fluoroadenosine
  modified_base (6)..(6): 2'-O-methyladenosine
  modified_base (7)..(7): 2'-deoxy-2'-fluoroguanosine
  modified_base (8)..(8): cm
  modified_base (9)..(9): 2'-deoxy-2'-fluorocytidine
  modified_base (10)..(10): 2'-O-methyladenosine
  modified_base (11)..(11): 2'-deoxy-2'-fluorocytidine
  modified_base (12)..(12): 2'-deoxy-2'-fluorouridine
  modified_base (13)..(13): gm
  modified_base (14)..(14): 2'-deoxy-2'-fluorouridine
  modified_base (15)..(15): gm
  modified_base (16)..(16): 2'-deoxy-2'-fluoroguanosine
  modified_base (17)..(17): um
  modified_base (18)..(18): 2'-deoxy-2'-fluoroguanosine
  modified_base (19)..(19): um
  modified_base (20)..(20): 2'-deoxy-2'-fluoroadenosine
  modified_base (21)..(21): cm
aaaaaagccacugugguguac

SEQ ID NO: 5893 - RNA, 21 nt, Artificial Sequence
  siRNA sense strand against b2GPI
  modified_base (1)..(1): 2'-deoxy-2'-fluoroadenosine
  modified_base (2)..(2): 2'-O-methyladenosine
  misc_feature (2)..(3): 5'-phosphonothioate
  modified_base (3)..(3): 2'-deoxy-2'-fluoroadenosine
  modified_base (4)..(4): 2'-O-methyladenosine
  modified_base (5)..(5): 2'-deoxy-2'-fluoroguanosine
  modified_base (6)..(6): cm
  modified_base (7)..(7): 2'-deoxy-2'-fluorocytidine
  modified_base (8)..(8): 2'-O-methyladenosine
  modified_base (9)..(9): 2'-deoxy-2'-fluorocytidine
  modified_base (10)..(10): um
  modified_base (11)..(11): 2'-deoxy-2'-fluoroguanosine
  modified_base (12)..(12): 2'-deoxy-2'-fluorouridine
  modified_base (13)..(13): gm
  modified_base (14)..(14): 2'-deoxy-2'-fluoroguanosine
  modified_base (15)..(15): um
  modified_base (16)..(16): 2'-deoxy-2'-fluoroguanosine
  modified_base (17)..(17): um
  modified_base (18)..(18): 2'-deoxy-2'-fluoroadenosine
  modified_base (19)..(19): cm
  modified_base (20)..(20): 2'-deoxy-2'-fluorocytidine
  modified_base (21)..(21): 2'-O-methyladenosine
aaaagccacugugguguacca

SEQ ID NO: 5894 - RNA, 21 nt, Artificial Sequence
  siRNA sense strand against b2GPI
  modified_base (1)..(1): 2'-deoxy-2'-fluoroadenosine
  modified_base (2)..(2): 2'-O-methyladenosine
  misc_feature (2)..(3): 5'-phosphonothioate
  modified_base (3)..(3): 2'-deoxy-2'-fluoroadenosine
  modified_base (4)..(4): gm
  modified_base (5)..(5): 2'-deoxy-2'-fluorocytidine
  modified_base (6)..(6): cm
  modified_base (7)..(7): 2'-deoxy-2'-fluoroadenosine
  modified_base (8)..(8): cm
  modified_base (9)..(9): 2'-deoxy-2'-fluorouridine
  modified_base (10)..(10): gm
  modified_base (11)..(11): 2'-deoxy-2'-fluorouridine
  modified_base (12)..(12): 2'-deoxy-2'-fluoroguanosine
  modified_base (13)..(13): gm
  modified_base (14)..(14): 2'-deoxy-2'-fluorouridine
  modified_base (15)..(15): gm
  modified_base (16)..(16): 2'-deoxy-2'-fluorouridine
  modified_base (17)..(17): 2'-O-methyladenosine
  modified_base (18)..(18): 2'-deoxy-2'-fluorocytidine
  modified_base (19)..(19): cm
  modified_base (20)..(20): 2'-deoxy-2'-fluoroadenosine
  modified_base (21)..(21): 2'-O-methyladenosine
aaagccacugugguguaccaa

SEQ ID NO: 5895 - RNA, 21 nt, Artificial Sequence
  siRNA sense strand against b2GPI
  modified_base (1)..(1): 2'-deoxy-2'-fluoroadenosine
  modified_base (2)..(2): 2'-O-methyladenosine
  misc_feature (2)..(3): 5'-phosphonothioate
  modified_base (3)..(3): 2'-deoxy-2'-fluoroguanosine
  modified_base (4)..(4): cm
  modified_base (5)..(5): 2'-deoxy-2'-fluorocytidine
  modified_base (6)..(6): 2'-O-methyladenosine
  modified_base (7)..(7): 2'-deoxy-2'-fluorocytidine
  modified_base (8)..(8): um
  modified_base (9)..(9): 2'-deoxy-2'-fluoroguanosine
  modified_base (10)..(10): um
  modified_base (11)..(11): 2'-deoxy-2'-fluoroguanosine
  modified_base (12)..(12): 2'-deoxy-2'-fluoroguanosine
  modified_base (13)..(13): um
  modified_base (14)..(14): 2'-deoxy-2'-fluoroguanosine
  modified_base (15)..(15): um
  modified_base (16)..(16): 2'-deoxy-2'-fluoroadenosine
  modified_base (17)..(17): cm
  modified_base (18)..(18): 2'-deoxy-2'-fluorocytidine
  modified_base (19)..(19): 2'-O-methyladenosine
  modified_base (20)..(20): 2'-deoxy-2'-fluoroadenosine
  modified_base (21)..(21): gm
aagccacugugguguaccaag

SEQ ID NO: 5896 - RNA, 21 nt, Artificial Sequence
  siRNA sense strand against b2GPI
  modified_base (1)..(1): 2'-deoxy-2'-fluoroguanosine
  modified_base (2)..(2): cm
  misc_feature (2)..(3): 5'-phosphonothioate
  modified_base (3)..(3): 2'-deoxy-2'-fluorocytidine
  modified_base (4)..(4): 2'-O-methyladenosine
  modified_base (5)..(5): 2'-deoxy-2'-fluorocytidine
  modified_base (6)..(6): um
  modified_base (7)..(7): 2'-deoxy-2'-fluoroguanosine
  modified_base (8)..(8): um
  modified_base (9)..(9): 2'-deoxy-2'-fluoroguanosine
  modified_base (10)..(10): gm
  modified_base (11)..(11): 2'-deoxy-2'-fluorouridine
  modified_base (12)..(12): 2'-deoxy-2'-fluoroguanosine
  modified_base (13)..(13): um
  modified_base (14)..(14): 2'-deoxy-2'-fluoroadenosine
  modified_base (15)..(15): cm
  modified_base (16)..(16): 2'-deoxy-2'-fluorocytidine
  modified_base (17)..(17): 2'-O-methyladenosine
  modified_base (18)..(18): 2'-deoxy-2'-fluoroadenosine
  modified_base (19)..(19): gm
  modified_base (20)..(20): 2'-deoxy-2'-fluoroguanosine
  modified_base (21)..(21): 2'-O-methyladenosine
gccacugugguguaccaagga

SEQ ID NO: 5897 - RNA, 21 nt, Artificial Sequence
  siRNA sense strand against b2GPI
  modified_base (1)..(1): 2'-deoxy-2'-fluorocytidine
  modified_base (2)..(2): 2'-O-methyladenosine
  misc_feature (2)..(3): 5'-phosphonothioate
  modified_base (3)..(3): 2'-deoxy-2'-fluorocytidine
  modified_base (4)..(4): um
  modified_base (5)..(5): 2'-deoxy-2'-fluoroguanosine
  modified_base (6)..(6): um
  modified_base (7)..(7): 2'-deoxy-2'-fluoroguanosine
  modified_base (8)..(8): gm
  modified_base (9)..(9): 2'-deoxy-2'-fluorouridine
  modified_base (10)..(10): gm
  modified_base (11)..(11): 2'-deoxy-2'-fluorouridine
  modified_base (12)..(12): 2'-deoxy-2'-fluoroadenosine
  modified_base (13)..(13): cm
  modified_base (14)..(14): 2'-deoxy-2'-fluorocytidine
  modified_base (15)..(15): 2'-O-methyladenosine
  modified_base (16)..(16): 2'-deoxy-2'-fluoroadenosine
  modified_base (17)..(17): gm
  modified_base (18)..(18): 2'-deoxy-2'-fluoroguanosine
  modified_base (19)..(19): 2'-O-methyladenosine
  modified_base (20)..(20): 2'-deoxy-2'-fluoroguanosine
  modified_base (21)..(21): 2'-O-methyladenosine
cacugugguguaccaaggaga

SEQ ID NO: 5898 - RNA, 21 nt, Artificial Sequence
  siRNA sense strand against b2GPI
  modified_base (1)..(1): 2'-deoxy-2'-fluoroadenosine
  modified_base (2)..(2): cm
  misc_feature (2)..(3): 5'-phosphonothioate
  modified_base (3)..(3): 2'-deoxy-2'-fluorouridine
  modified_base (4)..(4): gm
  modified_base (5)..(5): 2'-deoxy-2'-fluorouridine
  modified_base (6)..(6): gm
  modified_base (7)..(7): 2'-deoxy-2'-fluoroguanosine
  modified_base (8)..(8): um
  modified_base (9)..(9): 2'-deoxy-2'-fluoroguanosine
  modified_base (10)..(10): um
  modified_base (11)..(11): 2'-deoxy-2'-fluoroadenosine
  modified_base (12)..(12): 2'-deoxy-2'-fluorocytidine
  modified_base (13)..(13): cm
  modified_base (14)..(14): 2'-deoxy-2'-fluoroadenosine
  modified_base (15)..(15): 2'-O-methyladenosine
  modified_base (16)..(16): 2'-deoxy-2'-fluoroguanosine
  modified_base (17)..(17): gm
  modified_base (18)..(18): 2'-deoxy-2'-fluoroadenosine
  modified_base (19)..(19): gm
  modified_base (20)..(20): 2'-deoxy-2'-fluoroadenosine
  modified_base (21)..(21): gm
acugugguguaccaaggagag

SEQ ID NO: 5899 - RNA, 21 nt, Artificial Sequence
  siRNA sense strand against b2GPI
  modified_base (1)..(1): 2'-deoxy-2'-fluorocytidine
  modified_base (2)..(2): um
  misc_feature (2)..(3): 5'-phosphonothioate
  modified_base (3)..(3): 2'-deoxy-2'-fluoroguanosine
  modified_base (4)..(4): um
  modified_base (5)..(5): 2'-deoxy-2'-fluoroguanosine
  modified_base (6)..(6): gm
  modified_base (7)..(7): 2'-deoxy-2'-fluorouridine
  modified_base (8)..(8): gm
  modified_base (9)..(9): 2'-deoxy-2'-fluorouridine
  modified_base (10)..(10): 2'-O-methyladenosine
  modified_base (11)..(11): 2'-deoxy-2'-fluorocytidine
  modified_base (12)..(12): 2'-deoxy-2'-fluorocytidine
  modified_base (13)..(13): 2'-O-methyladenosine
  modified_base (14)..(14): 2'-deoxy-2'-fluoroadenosine
  modified_base (15)..(15): gm
  modified_base (16)..(16): 2'-deoxy-2'-fluoroguanosine
  modified_base (17)..(17): 2'-O-methyladenosine
  modified_base (18)..(18): 2'-deoxy-2'-fluoroguanosine
  modified_base (19)..(19): 2'-O-methyladenosine
  modified_base (20)..(20): 2'-deoxy-2'-fluoroguanosine
  modified_base (21)..(21): 2'-O-methyladenosine
cugugguguaccaaggagaga

SEQ ID NO: 5900 - RNA, 21 nt, Artificial Sequence
  siRNA sense strand against b2GPI
  modified_base (1)..(1): 2'-deoxy-2'-fluorouridine
  modified_base (2)..(2): gm
  misc_feature (2)..(3): 5'-phosphonothioate
  modified_base (3)..(3): 2'-deoxy-2'-fluorouridine
  modified_base (4)..(4): gm
  modified_base (5)..(5): 2'-deoxy-2'-fluoroguanosine
  modified_base (6)..(6): um
  modified_base (7)..(7): 2'-deoxy-2'-fluoroguanosine
  modified_base (8)..(8): um
  modified_base (9)..(9): 2'-deoxy-2'-fluoroadenosine
  modified_base (10)..(10): cm
  modified_base (11)..(11): 2'-deoxy-2'-fluorocytidine
  modified_base (12)..(12): 2'-deoxy-2'-fluoroadenosine
  modified_base (13)..(13): 2'-O-methyladenosine
  modified_base (14)..(14): 2'-deoxy-2'-fluoroguanosine
  modified_base (15)..(15): gm
  modified_base (16)..(16): 2'-deoxy-2'-fluoroadenosine
  modified_base (17)..(17): gm
  modified_base (18)..(18): 2'-deoxy-2'-fluoroadenosine
  modified_base (19)..(19): gm
  modified_base (20)..(20): 2'-deoxy-2'-fluoroadenosine
  modified_base (21)..(21): gm
ugugguguaccaaggagagag

SEQ ID NO: 5901 - RNA, 21 nt, Artificial Sequence
  siRNA sense strand against b2GPI
  modified_base (1)..(1): 2'-deoxy-2'-fluoroguanosine
  modified_base (2)..(2): um
  misc_feature (2)..(3): 5'-phosphonothioate
  modified_base (3)..(3): 2'-deoxy-2'-fluoroguanosine
  modified_base (4)..(4): gm
  modified_base (5)..(5): 2'-deoxy-2'-fluorouridine
  modified_base (6)..(6): gm
  modified_base (7)..(7): 2'-deoxy-2'-fluorouridine
  modified_base (8)..(8): 2'-O-methyladenosine
  modified_base (9)..(9): 2'-deoxy-2'-fluorocytidine
  modified_base (10)..(10): cm
  modified_base (11)..(11): 2'-deoxy-2'-fluoroadenosine
  modified_base (12)..(12): 2'-deoxy-2'-fluoroadenosine
  modified_base (13)..(13): gm
  modified_base (14)..(14): 2'-deoxy-2'-fluoroguanosine
  modified_base (15)..(15): 2'-O-methyladenosine
  modified_base (16)..(16): 2'-deoxy-2'-fluoroguanosine
  modified_base (17)..(17): 2'-O-methyladenosine
  modified_base (18)..(18): 2'-deoxy-2'-fluoroguanosine
  modified_base (19)..(19): 2'-O-methyladenosine
  modified_base (20)..(20): 2'-deoxy-2'-fluoroguanosine
  modified_base (21)..(21): 2'-O-methyladenosine
gugguguaccaaggagagaga

SEQ ID NO: 5902 - RNA, 21 nt, Artificial Sequence
  siRNA sense strand against b2GPI
  modified_base (1)..(1): 2'-deoxy-2'-fluorouridine
  modified_base (2)..(2): gm
  misc_feature (2)..(3): 5'-phosphonothioate
  modified_base (3)..(3): 2'-deoxy-2'-fluoroguanosine
  modified_base (4)..(4): um
  modified_base (5)..(5): 2'-deoxy-2'-fluoroguanosine
  modified_base (6)..(6): um
  modified_base (7)..(7): 2'-deoxy-2'-fluoroadenosine
  modified_base (8)..(8): cm
  modified_base (9)..(9): 2'-deoxy-2'-fluorocytidine
  modified_base (10)..(10): 2'-O-methyladenosine
  modified_base (11)..(11): 2'-deoxy-2'-fluoroadenosine
  modified_base (12)..(12): 2'-deoxy-2'-fluoroguanosine
  modified_base (13)..(13): gm
  modified_base (14)..(14): 2'-deoxy-2'-fluoroadenosine
  modified_base (15)..(15): gm
  modified_base (16)..(16): 2'-deoxy-2'-fluoroadenosine
  modified_base (17)..(17): gm
  modified_base (18)..(18): 2'-deoxy-2'-fluoroadenosine
  modified_base (19)..(19): gm
  modified_base (20)..(20): 2'-deoxy-2'-fluoroadenosine
  modified_base (21)..(21): gm
ugguguaccaaggagagagag

SEQ ID NO: 5903 - RNA, 21 nt, Artificial Sequence
  siRNA sense strand against b2GPI
  modified_base (1)..(1): 2'-deoxy-2'-fluoroguanosine
  modified_base (2)..(2): um
  misc_feature (2)..(3): 5'-phosphonothioate
  modified_base (3)..(3): 2'-deoxy-2'-fluoroguanosine
  modified_base (4)..(4): um
  modified_base (5)..(5): 2'-deoxy-2'-fluoroadenosine
  modified_base (6)..(6): cm
  modified_base (7)..(7): 2'-deoxy-2'-fluorocytidine
  modified_base (8)..(8): 2'-O-methyladenosine
  modified_base (9)..(9): 2'-deoxy-2'-fluoroadenosine
  modified_base (10)..(10): gm
  modified_base (11)..(11): 2'-deoxy-2'-fluoroguanosine
  modified_base (12)..(12): 2'-deoxy-2'-fluoroadenosine
  modified_base (13)..(13): gm
  modified_base (14)..(14): 2'-deoxy-2'-fluoroadenosine
  modified_base (15)..(15): gm
  modified_base (16)..(16): 2'-deoxy-2'-fluoroadenosine
  modified_base (17)..(17): gm
  modified_base (18)..(18): 2'-deoxy-2'-fluoroadenosine
  modified_base (19)..(19): gm
  modified_base (20)..(20): 2'-deoxy-2'-fluorouridine
  modified_base (21)..(21): 2'-O-methyladenosine
guguaccaaggagagagagua

SEQ ID NO: 5904 - RNA, 21 nt, Artificial Sequence
  siRNA sense strand against b2GPI
  modified_base (1)..(1): 2'-deoxy-2'-fluorouridine
  modified_base (2)..(2): gm
  misc_feature (2)..(3): 5'-phosphonothioate
  modified_base (3)..(3): 2'-deoxy-2'-fluorouridine
  modified_base (4)..(4): 2'-O-methyladenosine
  modified_base (5)..(5): 2'-deoxy-2'-fluorocytidine
  modified_base (6)..(6): cm
  modified_base (7)..(7): 2'-deoxy-2'-fluoroadenosine
  modified_base (8)..(8): 2'-O-methyladenosine
  modified_base (9)..(9): 2'-deoxy-2'-fluoroguanosine
  modified_base (10)..(10): gm
  modified_base (11)..(11): 2'-deoxy-2'-fluoroadenosine
  modified_base (12)..(12): 2'-deoxy-2'-fluoroguanosine
  modified_base (13)..(13): 2'-O-methyladenosine
  modified_base (14)..(14): 2'-deoxy-2'-fluoroguanosine
  modified_base (15)..(15): 2'-O-methyladenosine
  modified_base (16)..(16): 2'-deoxy-2'-fluoroguanosine
  modified_base (17)..(17): 2'-O-methyladenosine
  modified_base (18)..(18): 2'-deoxy-2'-fluoroguanosine
  modified_base (19)..(19): um
  modified_base (20)..(20): 2'-deoxy-2'-fluoroadenosine
  modified_base (21)..(21): 2'-O-methyladenosine
uguaccaaggagagagaguaa

SEQ ID NO: 5905 - RNA, 21 nt, Artificial Sequence
  siRNA sense strand against b2GPI
  modified_base (1)..(1): 2'-deoxy-2'-fluoroguanosine
  modified_base (2)..(2): um
  misc_feature (2)..(3): 5'-phosphonothioate
  modified_base (3)..(3): 2'-deoxy-2'-fluoroadenosine
  modified_base (4)..(4): cm
  modified_base (5)..(5): 2'-deoxy-2'-fluorocytidine
  modified_base (6)..(6): 2'-O-methyladenosine
  modified_base (7)..(7): 2'-deoxy-2'-fluoroadenosine
  modified_base (8)..(8): gm
  modified_base (9)..(9): 2'-deoxy-2'-fluoroguanosine
  modified_base (10)..(10): 2'-O-methyladenosine
  modified_base (11)..(11): 2'-deoxy-2'-fluoroguanosine
  modified_base (12)..(12): 2'-deoxy-2'-fluoroadenosine
  modified_base (13)..(13): gm
  modified_base (14)..(14): 2'-deoxy-2'-fluoroadenosine
  modified_base (15)..(15): gm
  modified_base (16)..(16): 2'-deoxy-2'-fluoroadenosine
  modified_base (17)..(17): gm
  modified_base (18)..(18): 2'-deoxy-2'-fluorouridine
  modified_base (19)..(19): 2'-O-methyladenosine
  modified_base (20)..(20): 2'-deoxy-2'-fluoroadenosine
  modified_base (21)..(21): 2'-O-methyladenosine
guaccaaggagagagaguaaa

SEQ ID NO: 5906 - RNA, 21 nt, Artificial Sequence
  siRNA sense strand against b2GPI
  modified_base (1)..(1): 2'-deoxy-2'-fluorouridine
  modified_base (2)..(2): 2'-O-methyladenosine
  misc_feature (2)..(3): 5'-phosphonothioate
  modified_base (3)..(3): 2'-deoxy-2'-fluorocytidine
  modified_base (4)..(4): cm
  modified_base (5)..(5): 2'-deoxy-2'-fluoroadenosine
  modified_base (6)..(6): 2'-O-methyladenosine
  modified_base (7)..(7): 2'-deoxy-2'-fluoroguanosine
  modified_base (8)..(8): gm
  modified_base (9)..(9): 2'-deoxy-2'-fluoroadenosine
  modified_base (10)..(10): gm
  modified_base (11)..(11): 2'-deoxy-2'-fluoroadenosine
  modified_base (12)..(12): 2'-deoxy-2'-fluoroguanosine
  modified_base (13)..(13): 2'-O-methyladenosine
  modified_base (14)..(14): 2'-deoxy-2'-fluoroguanosine
  modified_base (15)..(15): 2'-O-methyladenosine
  modified_base (16)..(16): 2'-deoxy-2'-fluoroguanosine
  modified_base (17)..(17): um
  modified_base (18)..(18): 2'-deoxy-2'-fluoroadenosine
  modified_base (19)..(19): 2'-O-methyladenosine
  modified_base (20)..(20): 2'-deoxy-2'-fluoroadenosine
  modified_base (21)..(21): gm
uaccaaggagagagaguaaag

SEQ ID NO: 5907 - RNA, 21 nt, Artificial Sequence
  siRNA sense strand against b2GPI
  modified_base (1)..(1): 2'-deoxy-2'-fluoroadenosine
  modified_base (2)..(2): cm
  misc_feature (2)..(3): 5'-phosphonothioate
  modified_base (3)..(3): 2'-deoxy-2'-fluorocytidine
  modified_base (4)..(4): 2'-O-methyladenosine
  modified_base (5)..(5): 2'-deoxy-2'-fluoroadenosine
  modified_base (6)..(6): gm
  modified_base (7)..(7): 2'-deoxy-2'-fluoroguanosine
  modified_base (8)..(8): 2'-O-methyladenosine
  modified_base (9)..(9): 2'-deoxy-2'-fluoroguanosine
  modified_base (10)..(10): 2'-O-methyladenosine
  modified_base (11)..(11): 2'-deoxy-2'-fluoroguanosine
  modified_base (12)..(12): 2'-deoxy-2'-fluoroadenosine
  modified_base (13)..(13): gm
  modified_base (14)..(14): 2'-deoxy-2'-fluoroadenosine
  modified_base (15)..(15): gm
  modified_base (16)..(16): 2'-deoxy-2'-fluorouridine
  modified_base (17)..(17): 2'-O-methyladenosine
  modified_base (18)..(18): 2'-deoxy-2'-fluoroadenosine
  modified_base (19)..(19): 2'-O-methyladenosine
  modified_base (20)..(20): 2'-deoxy-2'-fluoroguanosine
  modified_base (21)..(21): 2'-O-methyladenosine
accaaggagagagaguaaaga

SEQ ID NO: 5908 - RNA, 21 nt, Artificial Sequence
  siRNA sense strand against b2GPI
  modified_base (1)..(1): 2'-deoxy-2'-fluorocytidine
  modified_base (2)..(2): cm
  misc_feature (2)..(3): 5'-phosphonothioate
  modified_base (3)..(3): 2'-deoxy-2'-fluoroadenosine
  modified_base (4)..(4): 2'-O-methyladenosine
  modified_base (5)..(5): 2'-deoxy-2'-fluoroguanosine
  modified_base (6)..(6): gm
  modified_base (7)..(7): 2'-deoxy-2'-fluoroadenosine
  modified_base (8)..(8): gm
  modified_base (9)..(9): 2'-deoxy-2'-fluoroadenosine
  modified_base (10)..(10): gm
  modified_base (11)..(11): 2'-deoxy-2'-fluoroadenosine
  modified_base (12)..(12): 2'-deoxy-2'-fluoroguanosine
  modified_base (13)..(13): 2'-O-methyladenosine
  modified_base (14)..(14): 2'-deoxy-2'-fluoroguanosine
  modified_base (15)..(15): um
  modified_base (16)..(16): 2'-deoxy-2'-fluoroadenosine
  modified_base (17)..(17): 2'-O-methyladenosine
  modified_base (18)..(18): 2'-deoxy-2'-fluoroadenosine
  modified_base (19)..(19): gm
  modified_base (20)..(20): 2'-deoxy-2'-fluoroadenosine
  modified_base (21)..(21): um
ccaaggagagagaguaaagau

SEQ ID NO: 5909 - RNA, 21 nt, Artificial Sequence
  siRNA sense strand against b2GPI
  modified_base (1)..(1): 2'-deoxy-2'-fluorocytidine
  modified_base (2)..(2): 2'-O-methyladenosine
  misc_feature (2)..(3): 5'-phosphonothioate
  modified_base (3)..(3): 2'-deoxy-2'-fluoroadenosine
  modified_base (4)..(4): gm
  modified_base (5)..(5): 2'-deoxy-2'-fluoroguanosine
  modified_base (6)..(6): 2'-O-methyladenosine
  modified_base (7)..(7): 2'-deoxy-2'-fluoroguanosine
  modified_base (8)..(8): 2'-O-methyladenosine
  modified_base (9)..(9): 2'-deoxy-2'-fluoroguanosine
  modified_base (10)..(10): 2'-O-methyladenosine
  modified_base (11)..(11): 2'-deoxy-2'-fluoroguanosine
  modified_base (12)..(12): 2'-deoxy-2'-fluoroadenosine
  modified_base (13)..(13): gm
  modified_base (14)..(14): 2'-deoxy-2'-fluorouridine
  modified_base (15)..(15): 2'-O-methyladenosine
  modified_base (16)..(16): 2'-deoxy-2'-fluoroadenosine
  modified_base (17)..(17): 2'-O-methyladenosine
  modified_base (18)..(18): 2'-deoxy-2'-fluoroguanosine
  modified_base (19)..(19): 2'-O-methyladenosine
  modified_base (20)..(20): 2'-deoxy-2'-fluorouridine
  modified_base (21)..(21): um
caaggagagagaguaaagauu

SEQ ID NO: 5910 - RNA, 21 nt, Artificial Sequence
  siRNA sense strand against b2GPI
  modified_base (1)..(1): 2'-deoxy-2'-fluoroadenosine
  modified_base (2)..(2): 2'-O-methyladenosine
  misc_feature (2)..(3): 5'-phosphonothioate
  modified_base (3)..(3): 2'-deoxy-2'-fluoroguanosine
  modified_base (4)..(4): gm
  modified_base (5)..(5): 2'-deoxy-2'-fluoroadenosine
  modified_base (6)..(6): gm
  modified_base (7)..(7): 2'-deoxy-2'-fluoroadenosine
  modified_base (8)..(8): gm
  modified_base (9)..(9): 2'-deoxy-2'-fluoroadenosine
  modified_base (10)..(10): gm
  modified_base (11)..(11): 2'-deoxy-2'-fluoroadenosine
  modified_base (12)..(12): 2'-deoxy-2'-fluoroguanosine
  modified_base (13)..(13): um
  modified_base (14)..(14): 2'-deoxy-2'-fluoroadenosine
  modified_base (15)..(15): 2'-O-methyladenosine
  modified_base (16)..(16): 2'-deoxy-2'-fluoroadenosine
  modified_base (17)..(17): gm
  modified_base (18)..(18): 2'-deoxy-2'-fluoroadenosine
  modified_base (19)..(19): um
  modified_base (20)..(20): 2'-deoxy-2'-fluorouridine
  modified_base (21)..(21): cm
aaggagagagaguaaagauuc

SEQ ID NO: 5911 - RNA, 21 nt, Artificial Sequence
  siRNA sense strand against b2GPI
  modified_base (1)..(1): 2'-deoxy-2'-fluoroadenosine
  modified_base (2)..(2): gm
  misc_feature (2)..(3): 5'-phosphonothioate
  modified_base (3)..(3): 2'-deoxy-2'-fluoroguanosine
  modified_base (4)..(4): 2'-O-methyladenosine
  modified_base (5)..(5): 2'-deoxy-2'-fluoroguanosine
  modified_base (6)..(6): 2'-O-methyladenosine
  modified_base (7)..(7): 2'-deoxy-2'-fluoroguanosine
  modified_base (8)..(8): 2'-O-methyladenosine
  modified_base (9)..(9): 2'-deoxy-2'-fluoroguanosine
  modified_base (10)..(10): 2'-O-methyladenosine
  modified_base (11)..(11): 2'-deoxy-2'-fluoroguanosine
  modified_base (12)..(12): 2'-deoxy-2'-fluorouridine
  modified_base (13)..(13): 2'-O-methyladenosine
  modified_base (14)..(14): 2'-deoxy-2'-fluoroadenosine
  modified_base (15)..(15): 2'-O-methyladenosine
  modified_base (16)..(16): 2'-deoxy-2'-fluoroguanosine
  modified_base (17)..(17): 2'-O-methyladenosine
  modified_base (18)..(18): 2'-deoxy-2'-fluorouridine
  modified_base (19)..(19): um
  modified_base (20)..(20): 2'-deoxy-2'-fluorocytidine
  modified_base (21)..(21): 2'-O-methyladenosine
aggagagagaguaaagauuca

SEQ ID NO: 5912 - RNA, 21 nt, Artificial Sequence
  siRNA sense strand against b2GPI
  modified_base (1)..(1): 2'-deoxy-2'-fluoroguanosine
  modified_base (2)..(2): gm
  misc_feature (2)..(3): 5'-phosphonothioate
  modified_base (3)..(3): 2'-deoxy-2'-fluoroadenosine
  modified_base (4)..(4): gm
  modified_base (5)..(5): 2'-deoxy-2'-fluoroadenosine
  modified_base (6)..(6): gm
  modified_base (7)..(7): 2'-deoxy-2'-fluoroadenosine
  modified_base (8)..(8): gm
  modified_base (9)..(9): 2'-deoxy-2'-fluoroadenosine
  modified_base (10)..(10): gm
  modified_base (11)..(11): 2'-deoxy-2'-fluorouridine
  modified_base (12)..(12): 2'-deoxy-2'-fluoroadenosine
  modified_base (13)..(13): 2'-O-methyladenosine
  modified_base (14)..(14): 2'-deoxy-2'-fluoroadenosine
  modified_base (15)..(15): gm
  modified_base (16)..(16): 2'-deoxy-2'-fluoroadenosine
  modified_base (17)..(17): um
  modified_base (18)..(18): 2'-deoxy-2'-fluorouridine
  modified_base (19)..(19): cm
  modified_base (20)..(20): 2'-deoxy-2'-fluoroadenosine
  modified_base (21)..(21): gm
ggagagagaguaaagauucag

SEQ ID NO: 5913 - RNA, 21 nt, Artificial Sequence
  siRNA sense strand against b2GPI
  modified_base (1)..(1): 2'-deoxy-2'-fluoroadenosine
  modified_base (2)..(2): gm
  misc_feature (2)..(3): 5'-phosphonothioate
  modified_base (3)..(3): 2'-deoxy-2'-fluoroadenosine
  modified_base (4)..(4): gm
  modified_base (5)..(5): 2'-deoxy-2'-fluoroadenosine
  modified_base (6)..(6): gm
  modified_base (7)..(7): 2'-deoxy-2'-fluoroadenosine
  modified_base (8)..(8): gm
  modified_base (9)..(9): 2'-deoxy-2'-fluorouridine
  modified_base (10)..(10): 2'-O-methyladenosine
  modified_base (11)..(11): 2'-deoxy-2'-fluoroadenosine
  modified_base (12)..(12): 2'-deoxy-2'-fluoroadenosine
  modified_base (13)..(13): gm
  modified_base (14)..(14): 2'-deoxy-2'-fluoroadenosine
  modified_base (15)..(15): um
  modified_base (16)..(16): 2'-deoxy-2'-fluorouridine
  modified_base (17)..(17): cm
  modified_base (18)..(18): 2'-deoxy-2'-fluoroadenosine
  modified_base (19)..(19): gm
  modified_base (20)..(20): 2'-deoxy-2'-fluoroguanosine
  modified_base (21)..(21): 2'-O-methyladenosine
agagagaguaaagauucagga

SEQ ID NO: 5914 - RNA, 21 nt, Artificial Sequence
  siRNA sense strand against b2GPI
  modified_base (1)..(1): 2'-deoxy-2'-fluoroguanosine
  modified_base (2)..(2): 2'-O-methyladenosine
  misc_feature (2)..(3): 5'-phosphonothioate
  modified_base (3)..(3): 2'-deoxy-2'-fluoroguanosine
  modified_base (4)..(4): 2'-O-methyladenosine
  modified_base (5)..(5): 2'-deoxy-2'-fluoroguanosine
  modified_base (6)..(6): 2'-O-methyladenosine
  modified_base (7)..(7): 2'-deoxy-2'-fluoroguanosine
  modified_base (8)..(8): um
  modified_base (9)..(9): 2'-deoxy-2'-fluoroadenosine
  modified_base (10)..(10): 2'-O-methyladenosine
  modified_base (11)..(11): 2'-deoxy-2'-fluoroadenosine
  modified_base (12)..(12): 2'-deoxy-2'-fluoroguanosine
  modified_base (13)..(13): 2'-O-methyladenosine
  modified_base (14)..(14): 2'-deoxy-2'-fluorouridine
  modified_base (15)..(15): um
  modified_base (16)..(16): 2'-deoxy-2'-fluorocytidine
  modified_base (17)..(17): 2'-O-methyladenosine
  modified_base (18)..(18): 2'-deoxy-2'-fluoroguanosine
  modified_base (19)..(19): gm
  modified_base (20)..(20): 2'-deoxy-2'-fluoroadenosine
  modified_base (21)..(21): 2'-O-methyladenosine
gagagaguaaagauucaggaa

SEQ ID NO: 5915 - RNA, 21 nt, Artificial Sequence
  siRNA sense strand against b2GPI
  modified_base (1)..(1): 2'-deoxy-2'-fluoroadenosine
  modified_base (2)..(2): gm
  misc_feature (2)..(3): 5'-phosphonothioate
  modified_base (3)..(3): 2'-deoxy-2'-fluoroadenosine
  modified_base (4)..(4): gm
  modified_base (5)..(5): 2'-deoxy-2'-fluoroadenosine
  modified_base (6)..(6): gm
  modified_base (7)..(7): 2'-deoxy-2'-fluorouridine
  modified_base (8)..(8): 2'-O-methyladenosine
  modified_base (9)..(9): 2'-deoxy-2'-fluoroadenosine
  modified_base (10)..(10): 2'-O-methyladenosine
  modified_base (11)..(11): 2'-deoxy-2'-fluoroguanosine
  modified_base (12)..(12): 2'-deoxy-2'-fluoroadenosine
  modified_base (13)..(13): um
  modified_base (14)..(14): 2'-deoxy-2'-fluorouridine
  modified_base (15)..(15): cm
  modified_base (16)..(16): 2'-deoxy-2'-fluoroadenosine
  modified_base (17)..(17): gm
  modified_base (18)..(18): 2'-deoxy-2'-fluoroguanosine
  modified_base (19)..(19): 2'-O-methyladenosine
  modified_base (20)..(20): 2'-deoxy-2'-fluoroadenosine
  modified_base (21)..(21): 2'-O-methyladenosine
agagaguaaagauucaggaaa

SEQ ID NO: 5916 - RNA, 21 nt, Artificial Sequence
  siRNA sense strand against b2GPI
  modified_base (1)..(1): 2'-deoxy-2'-fluoroguanosine
  modified_base (2)..(2): 2'-O-methyladenosine
  misc_feature (2)..(3): 5'-phosphonothioate
  modified_base (3)..(3): 2'-deoxy-2'-fluoroguanosine
  modified_base (4)..(4): 2'-O-methyladenosine
  modified_base (5)..(5): 2'-deoxy-2'-fluoroguanosine
  modified_base (6)..(6): um
  modified_base (7)..(7): 2'-deoxy-2'-fluoroadenosine
  modified_base (8)..(8): 2'-O-methyladenosine
  modified_base (9)..(9): 2'-deoxy-2'-fluoroadenosine
  modified_base (10)..(10): gm
  modified_base (11)..(11): 2'-deoxy-2'-fluoroadenosine
  modified_base (12)..(12): 2'-deoxy-2'-fluorouridine
  modified_base (13)..(13): um
  modified_base (14)..(14): 2'-deoxy-2'-fluorocytidine
  modified_base (15)..(15): 2'-O-methyladenosine
  modified_base (16)..(16): 2'-deoxy-2'-fluoroguanosine
  modified_base (17)..(17): gm
  modified_base (18)..(18): 2'-deoxy-2'-fluoroadenosine
  modified_base (19)..(19): 2'-O-methyladenosine
  modified_base (20)..(20): 2'-deoxy-2'-fluoroadenosine
  modified_base (21)..(21): 2'-O-methyladenosine
gagaguaaagauucaggaaaa

SEQ ID NO: 5917 - RNA, 21 nt, Artificial Sequence
  siRNA sense strand against b2GPI
  modified_base (1)..(1): 2'-deoxy-2'-fluoroadenosine
  modified_base (2)..(2): gm
  misc_feature (2)..(3): 5'-phosphonothioate
  modified_base (3)..(3): 2'-deoxy-2'-fluoroadenosine
  modified_base (4)..(4): gm
  modified_base (5)..(5): 2'-deoxy-2'-fluorouridine
  modified_base (6)..(6): 2'-O-methyladenosine
  modified_base (7)..(7): 2'-deoxy-2'-fluoroadenosine
  modified_base (8)..(8): 2'-O-methyladenosine
  modified_base (9)..(9): 2'-deoxy-2'-fluoroguanosine
  modified_base (10)..(10): 2'-O-methyladenosine
  modified_base (11)..(11): 2'-deoxy-2'-fluorouridine
  modified_base (12)..(12): 2'-deoxy-2'-fluorouridine
  modified_base (13)..(13): cm
  modified_base (14)..(14): 2'-deoxy-2'-fluoroadenosine
  modified_base (15)..(15): gm
  modified_base (16)..(16): 2'-deoxy-2'-fluoroguanosine
  modified_base (17)..(17): 2'-O-methyladenosine
  modified_base (18)..(18): 2'-deoxy-2'-fluoroadenosine
  modified_base (19)..(19): 2'-O-methyladenosine
  modified_base (20)..(20): 2'-deoxy-2'-fluoroadenosine
  modified_base (21)..(21): 2'-O-methyladenosine
agaguaaagauucaggaaaaa

SEQ ID NO: 5918 - RNA, 21 nt, Artificial Sequence
  siRNA sense strand against b2GPI
  modified_base (1)..(1): 2'-deoxy-2'-fluoroguanosine
  modified_base (2)..(2): 2'-O-methyladenosine
  misc_feature (2)..(3): 5'-phosphonothioate
  modified_base (3)..(3): 2'-deoxy-2'-fluoroguanosine
  modified_base (4)..(4): um
  modified_base (5)..(5): 2'-deoxy-2'-fluoroadenosine
  modified_base (6)..(6): 2'-O-methyladenosine
  modified_base (7)..(7): 2'-deoxy-2'-fluoroadenosine
  modified_base (8)..(8): gm
  modified_base (9)..(9): 2'-deoxy-2'-fluoroadenosine
  modified_base (10)..(10): um
  modified_base (11)..(11): 2'-deoxy-2'-fluorouridine
  modified_base (12)..(12): 2'-deoxy-2'-fluorocytidine
  modified_base (13)..(13): 2'-O-methyladenosine
  modified_base (14)..(14): 2'-deoxy-2'-fluoroguanosine
  modified_base (15)..(15): gm
  modified_base (16)..(16): 2'-deoxy-2'-fluoroadenosine
  modified_base (17)..(17): 2'-O-methyladenosine
  modified_base (18)..(18): 2'-deoxy-2'-fluoroadenosine
  modified_base (19)..(19): 2'-O-methyladenosine
  modified_base (20)..(20): 2'-deoxy-2'-fluoroadenosine
  modified_base (21)..(21): um
gaguaaagauucaggaaaaau

SEQ ID NO: 5919 - RNA, 21 nt, Artificial Sequence
  siRNA sense strand against b2GPI
  modified_base (1)..(1): 2'-deoxy-2'-fluoroadenosine
  modified_base (2)..(2): gm
  misc_feature (2)..(3): 5'-phosphonothioate
  modified_base (3)..(3): 2'-deoxy-2'-fluorouridine
  modified_base (4)..(4): 2'-O-methyladenosine
  modified_base (5)..(5): 2'-deoxy-2'-fluoroadenosine
  modified_base (6)..(6): 2'-O-methyladenosine
  modified_base (7)..(7): 2'-deoxy-2'-fluoroguanosine
  modified_base (8)..(8): 2'-O-methyladenosine
  modified_base (9)..(9): 2'-deoxy-2'-fluorouridine
  modified_base (10)..(10): um
  modified_base (11)..(11): 2'-deoxy-2'-fluorocytidine
  modified_base (12)..(12): 2'-deoxy-2'-fluoroadenosine
  modified_base (13)..(13): gm
  modified_base (14)..(14): 2'-deoxy-2'-fluoroguanosine
  modified_base (15)..(15): 2'-O-methyladenosine
  modified_base (16)..(16): 2'-deoxy-2'-fluoroadenosine
  modified_base (17)..(17): 2'-O-methyladenosine
  modified_base (18)..(18): 2'-deoxy-2'-fluoroadenosine
  modified_base (19)..(19): 2'-O-methyladenosine
  modified_base (20)..(20): 2'-deoxy-2'-fluorouridine
  modified_base (21)..(21): um
aguaaagauucaggaaaaauu

SEQ ID NO: 5920 - RNA, 21 nt, Artificial Sequence
  siRNA sense strand against b2GPI
  modified_base (1)..(1): 2'-deoxy-2'-fluoroguanosine
  modified_base (2)..(2): um
  misc_feature (2)..(3): 5'-phosphonothioate
  modified_base (3)..(3): 2'-deoxy-2'-fluoroadenosine
  modified_base (4)..(4): 2'-O-methyladenosine
  modified_base (5)..(5): 2'-deoxy-2'-fluoroadenosine
  modified_base (6)..(6): gm
  modified_base (7)..(7): 2'-deoxy-2'-fluoroadenosine
  modified_base (8)..(8): um
  modified_base (9)..(9): 2'-deoxy-2'-fluorouridine
  modified_base (10)..(10): cm
  modified_base (11)..(11): 2'-deoxy-2'-fluoroadenosine
  modified_base (12)..(12): 2'-deoxy-2'-fluoroguanosine
  modified_base (13)..(13): gm
  modified_base (14)..(14): 2'-deoxy-2'-fluoroadenosine
  modified_base (15)..(15): 2'-O-methyladenosine
  modified_base (16)..(16): 2'-deoxy-2'-fluoroadenosine
  modified_base (17)..(17): 2'-O-methyladenosine
  modified_base (18)..(18): 2'-deoxy-2'-fluoroadenosine
  modified_base (19)..(19): um
  modified_base (20)..(20): 2'-deoxy-2'-fluorouridine
  modified_base (21)..(21): um
guaaagauucaggaaaaauuu

SEQ ID NO: 5921 - RNA, 21 nt, Artificial Sequence
  siRNA sense strand against b2GPI
  modified_base (1)..(1): 2'-deoxy-2'-fluorouridine
  modified_base (2)..(2): 2'-O-methyladenosine
  misc_feature (2)..(3): 5'-phosphonothioate
  modified_base (3)..(3): 2'-deoxy-2'-fluoroadenosine
  modified_base (4)..(4): 2'-O-methyladenosine
  modified_base (5)..(5): 2'-deoxy-2'-fluoroguanosine
  modified_base (6)..(6): 2'-O-methyladenosine
  modified_base (7)..(7): 2'-deoxy-2'-fluorouridine
  modified_base (8)..(8): um
  modified_base (9)..(9): 2'-deoxy-2'-fluorocytidine
  modified_base (10)..(10): 2'-O-methyladenosine
  modified_base (11)..(11): 2'-deoxy-2'-fluoroguanosine
  modified_base (12)..(12): 2'-deoxy-2'-fluoroguanosine
  modified_base (13)..(13): 2'-O-methyladenosine
  modified_base (14)..(14): 2'-deoxy-2'-fluoroadenosine
  modified_base (15)..(15): 2'-O-methyladenosine
  modified_base (16)..(16): 2'-deoxy-2'-fluoroadenosine
  modified_base (17)..(17): 2'-O-methyladenosine
  modified_base (18)..(18): 2'-deoxy-2'-fluorouridine
  modified_base (19)..(19): um
  modified_base (20)..(20): 2'-deoxy-2'-fluorouridine
  modified_base (21)..(21): 2'-O-methyladenosine
uaaagauucaggaaaaauuua

SEQ ID NO: 5922 - RNA, 21 nt, Artificial Sequence
  siRNA sense strand against b2GPI
  modified_base (1)..(1): 2'-deoxy-2'-fluoroadenosine
  modified_base (2)..(2): 2'-O-methyladenosine
  misc_feature (2)..(3): 5'-phosphonothioate
  modified_base (3)..(3): 2'-deoxy-2'-fluoroadenosine
  modified_base (4)..(4): gm
  modified_base (5)..(5): 2'-deoxy-2'-fluoroadenosine
  modified_base (6)..(6): um
  modified_base (7)..(7): 2'-deoxy-2'-fluorouridine
  modified_base (8)..(8): cm
  modified_base (9)..(9): 2'-deoxy-2'-fluoroadenosine
  modified_base (10)..(10): gm
  modified_base (11)..(11): 2'-deoxy-2'-fluoroguanosine
  modified_base (12)..(12): 2'-deoxy-2'-fluoroadenosine
  modified_base (13)..(13): 2'-O-methyladenosine
  modified_base (14)..(14): 2'-deoxy-2'-fluoroadenosine
  modified_base (15)..(15): 2'-O-methyladenosine
  modified_base (16)..(16): 2'-deoxy-2'-fluoroadenosine
  modified_base (17)..(17): um
  modified_base (18)..(18): 2'-deoxy-2'-fluorouridine
  modified_base (19)..(19): um
  modified_base (20)..(20): 2'-deoxy-2'-fluoroadenosine
  modified_base (21)..(21): 2'-O-methyladenosine
aaagauucaggaaaaauuuaa

SEQ ID NO: 5923 - RNA, 21 nt, Artificial Sequence
  siRNA sense strand against b2GPI
  modified_base (1)..(1): 2'-deoxy-2'-fluorouridine
  modified_base (2)..(2): cm
  misc_feature (2)..(3): 5'-phosphonothioate
  modified_base (3)..(3): 2'-deoxy-2'-fluoroadenosine
  modified_base (4)..(4): gm
  modified_base (5)..(5): 2'-deoxy-2'-fluoroguanosine
  modified_base (6)..(6): 2'-O-methyladenosine
  modified_base (7)..(7): 2'-deoxy-2'-fluoroadenosine
  modified_base (8)..(8): 2'-O-methyladenosine
  modified_base (9)..(9): 2'-deoxy-2'-fluoroadenosine
  modified_base (10)..(10): 2'-O-methyladenosine
  modified_base (11)..(11): 2'-deoxy-2'-fluorouridine
  modified_base (12)..(12): 2'-deoxy-2'-fluorouridine
  modified_base (13)..(13): um
  modified_base (14)..(14): 2'-deoxy-2'-fluoroadenosine
  modified_base (15)..(15): 2'-O-methyladenosine
  modified_base (16)..(16): 2'-deoxy-2'-fluoroguanosine
  modified_base (17)..(17): 2'-O-methyladenosine
  modified_base (18)..(18): 2'-deoxy-2'-fluoroadenosine
  modified_base (19)..(19): um
  modified_base (20)..(20): 2'-deoxy-2'-fluoroguanosine
  modified_base (21)..(21): gm
ucaggaaaaauuuaagaaugg

SEQ ID NO: 5924 - RNA, 21 nt, Artificial Sequence
  siRNA sense strand against b2GPI
  modified_base (1)..(1): 2'-deoxy-2'-fluorocytidine
  modified_base (2)..(2): 2'-O-methyladenosine
  misc_feature (2)..(3): 5'-phosphonothioate
  modified_base (3)..(3): 2'-deoxy-2'-fluoroguanosine
  modified_base (4)..(4): gm
  modified_base (5)..(5): 2'-deoxy-2'-fluoroadenosine
  modified_base (6)..(6): 2'-O-methyladenosine
  modified_base (7)..(7): 2'-deoxy-2'-fluoroadenosine
  modified_base (8)..(8): 2'-O-methyladenosine
  modified_base (9)..(9): 2'-deoxy-2'-fluoroadenosine
  modified_base (10)..(10): um
  modified_base (11)..(11): 2'-deoxy-2'-fluorouridine
  modified_base (12)..(12): 2'-deoxy-2'-fluorouridine
  modified_base (13)..(13): 2'-O-methyladenosine
  modified_base (14)..(14): 2'-deoxy-2'-fluoroadenosine
  modified_base (15)..(15): gm
  modified_base (16)..(16): 2'-deoxy-2'-fluoroadenosine
  modified_base (17)..(17): 2'-O-methyladenosine
  modified_base (18)..(18): 2'-deoxy-2'-fluorouridine
  modified_base (19)..(19): gm
  modified_base (20)..(20): 2'-deoxy-2'-fluoroguanosine
  modified_base (21)..(21): 2'-O-methyladenosine
caggaaaaauuuaagaaugga

SEQ ID NO: 5925 - RNA, 21 nt, Artificial Sequence
  siRNA sense strand against b2GPI
  modified_base (1)..(1): 2'-deoxy-2'-fluoroadenosine
  modified_base (2)..(2): gm
  misc_feature (2)..(3): 5'-phosphonothioate
  modified_base (3)..(3): 2'-deoxy-2'-fluoroguanosine
  modified_base (4)..(4): 2'-O-methyladenosine
  modified_base (5)..(5): 2'-deoxy-2'-fluoroadenosine
  modified_base (6)..(6): 2'-O-methyladenosine
  modified_base (7)..(7): 2'-deoxy-2'-fluoroadenosine
  modified_base (8)..(8): 2'-O-methyladenosine
  modified_base (9)..(9): 2'-deoxy-2'-fluorouridine
  modified_base (10)..(10): um
  modified_base (11)..(11): 2'-deoxy-2'-fluorouridine
  modified_base (12)..(12): 2'-deoxy-2'-fluoroadenosine
  modified_base (13)..(13): 2'-O-methyladenosine
  modified_base (14)..(14): 2'-deoxy-2'-fluoroguanosine
  modified_base (15)..(15): 2'-O-methyladenosine
  modified_base (16)..(16): 2'-deoxy-2'-fluoroadenosine
  modified_base (17)..(17): um
  modified_base (18)..(18): 2'-deoxy-2'-fluoroguanosine
  modified_base (19)..(19): gm
  modified_base (20)..(20): 2'-deoxy-2'-fluoroadenosine
  modified_base (21)..(21): 2'-O-methyladenosine
aggaaaaauuuaagaauggaa

SEQ ID NO: 5926 - RNA, 21 nt, Artificial Sequence
  siRNA sense strand against b2GPI
  modified_base (1)..(1): 2'-deoxy-2'-fluoroadenosine
  modified_base (2)..(2): 2'-O-methyladenosine
  misc_feature (2)..(3): 5'-phosphonothioate
  modified_base (3)..(3): 2'-deoxy-2'-fluoroadenosine
  modified_base (4)..(4): um
  modified_base (5)..(5): 2'-deoxy-2'-fluorouridine
  modified_base (6)..(6): um
  modified_base (7)..(7): 2'-deoxy-2'-fluoroadenosine
  modified_base (8)..(8): 2'-O-methyladenosine
  modified_base (9)..(9): 2'-deoxy-2'-fluoroguanosine
  modified_base (10)..(10): 2'-O-methyladenosine
  modified_base (11)..(11): 2'-deoxy-2'-fluoroadenosine
  modified_base (12)..(12): 2'-deoxy-2'-fluorouridine
  modified_base (13)..(13): gm
  modified_base (14)..(14): 2'-deoxy-2'-fluoroguanosine
  modified_base (15)..(15): 2'-O-methyladenosine
  modified_base (16)..(16): 2'-deoxy-2'-fluoroadenosine
  modified_base (17)..(17): um
  modified_base (18)..(18): 2'-deoxy-2'-fluoroguanosine
  modified_base (19)..(19): cm
  modified_base (20)..(20): 2'-deoxy-2'-fluorouridine
  modified_base (21)..(21): 2'-O-methyladenosine
aaauuuaagaauggaaugcua

SEQ ID NO: 5927 - RNA, 21 nt, Artificial Sequence
  siRNA sense strand against b2GPI
  modified_base (1)..(1): 2'-deoxy-2'-fluoroadenosine
  modified_base (2)..(2): um
  misc_feature (2)..(3): 5'-phosphonothioate
  modified_base (3)..(3): 2'-deoxy-2'-fluorouridine
  modified_base (4)..(4): um
  modified_base (5)..(5): 2'-deoxy-2'-fluoroadenosine
  modified_base (6)..(6): 2'-O-methyladenosine
  modified_base (7)..(7): 2'-deoxy-2'-fluoroguanosine
  modified_base (8)..(8): 2'-O-methyladenosine
  modified_base (9)..(9): 2'-deoxy-2'-fluoroadenosine
  modified_base (10)..(10): um
  modified_base (11)..(11): 2'-deoxy-2'-fluoroguanosine
  modified_base (12)..(12): 2'-deoxy-2'-fluoroguanosine
  modified_base (13)..(13): 2'-O-methyladenosine
  modified_base (14)..(14): 2'-deoxy-2'-fluoroadenosine
  modified_base (15)..(15): um
  modified_base (16)..(16): 2'-deoxy-2'-fluoroguanosine
  modified_base (17)..(17): cm
  modified_base (18)..(18): 2'-deoxy-2'-fluorouridine
  modified_base (19)..(19): 2'-O-methyladenosine
  modified_base (20)..(20): 2'-deoxy-2'-fluorocytidine
  modified_base (21)..(21): 2'-O-methyladenosine
auuuaagaauggaaugcuaca

SEQ ID NO: 5928 - RNA, 21 nt, Artificial Sequence
  siRNA sense strand against b2GPI
  modified_base (1)..(1): 2'-deoxy-2'-fluorouridine
  modified_base (2)..(2): 2'-O-methyladenosine
  misc_feature (2)..(3): 5'-phosphonothioate
  modified_base (3)..(3): 2'-deoxy-2'-fluoroadenosine
  modified_base (4)..(4): gm
  modified_base (5)..(5): 2'-deoxy-2'-fluoroadenosine
  modified_base (6)..(6): 2'-O-methyladenosine
  modified_base (7)..(7): 2'-deoxy-2'-fluorouridine
  modified_base (8)..(8): gm
  modified_base (9)..(9): 2'-deoxy-2'-fluoroguanosine
  modified_base (10)..(10): 2'-O-methyladenosine
  modified_base (11)..(11): 2'-deoxy-2'-fluoroadenosine
  modified_base (12)..(12): 2'-deoxy-2'-fluorouridine
  modified_base (13)..(13): gm
  modified_base (14)..(14): 2'-deoxy-2'-fluorocytidine
  modified_base (15)..(15): um
  modified_base (16)..(16): 2'-deoxy-2'-fluoroadenosine
  modified_base (17)..(17): cm
  modified_base (18)..(18): 2'-deoxy-2'-fluoroadenosine
  modified_base (19)..(19): um
  modified_base (20)..(20): 2'-deoxy-2'-fluoroguanosine
  modified_base (21)..(21): gm
uaagaauggaaugcuacaugg

SEQ ID NO: 5929 - RNA, 21 nt, Artificial Sequence
  siRNA sense strand against b2GPI
  modified_base (1)..(1): 2'-deoxy-2'-fluoroadenosine
  modified_base (2)..(2): 2'-O-methyladenosine
  misc_feature (2)..(3): 5'-phosphonothioate
  modified_base (3)..(3): 2'-deoxy-2'-fluoroguanosine
  modified_base (4)..(4): 2'-O-methyladenosine
  modified_base (5)..(5): 2'-deoxy-2'-fluoroadenosine
  modified_base (6)..(6): um
  modified_base (7)..(7): 2'-deoxy-2'-fluoroguanosine
  modified_base (8)..(8): gm
  modified_base (9)..(9): 2'-deoxy-2'-fluoroadenosine
  modified_base (10)..(10): 2'-O-methyladenosine
  modified_base (11)..(11): 2'-deoxy-2'-fluorouridine
  modified_base (12)..(12): 2'-deoxy-2'-fluoroguanosine
  modified_base (13)..(13): cm
  modified_base (14)..(14): 2'-deoxy-2'-fluorouridine
  modified_base (15)..(15): 2'-O-methyladenosine
  modified_base (16)..(16): 2'-deoxy-2'-fluorocytidine
  modified_base (17)..(17): 2'-O-methyladenosine
  modified_base (18)..(18): 2'-deoxy-2'-fluorouridine
  modified_base (19)..(19): gm
  modified_base (20)..(20): 2'-deoxy-2'-fluoroguanosine
  modified_base (21)..(21): um
aagaauggaaugcuacauggu

SEQ ID NO: 5930 - RNA, 21 nt, Artificial Sequence
  siRNA sense strand against b2GPI
  modified_base (1)..(1): 2'-deoxy-2'-fluoroadenosine
  modified_base (2)..(2): gm
  misc_feature (2)..(3): 5'-phosphonothioate
  modified_base (3)..(3): 2'-deoxy-2'-fluoroadenosine
  modified_base (4)..(4): 2'-O-methyladenosine
  modified_base (5)..(5): 2'-deoxy-2'-fluorouridine
  modified_base (6)..(6): gm
  modified_base (7)..(7): 2'-deoxy-2'-fluoroguanosine
  modified_base (8)..(8): 2'-O-methyladenosine
  modified_base (9)..(9): 2'-deoxy-2'-fluoroadenosine
  modified_base (10)..(10): um
  modified_base (11)..(11): 2'-deoxy-2'-fluoroguanosine
  modified_base (12)..(12): 2'-deoxy-2'-fluorocytidine
  modified_base (13)..(13): um
  modified_base (14)..(14): 2'-deoxy-2'-fluoroadenosine
  modified_base (15)..(15): cm
  modified_base (16)..(16): 2'-deoxy-2'-fluoroadenosine
  modified_base (17)..(17): um
  modified_base (18)..(18): 2'-deoxy-2'-fluoroguanosine
  modified_base (19)..(19): gm
  modified_base (20)..(20): 2'-deoxy-2'-fluorouridine
  modified_base (21)..(21): gm
agaauggaaugcuacauggug

SEQ ID NO: 5931 - RNA, 21 nt, Artificial Sequence
  siRNA sense strand against b2GPI
  modified_base (1)..(1): 2'-deoxy-2'-fluoroguanosine
  modified_base (2)..(2): 2'-O-methyladenosine
  misc_feature (2)..(3): 5'-phosphonothioate
  modified_base (3)..(3): 2'-deoxy-2'-fluoroadenosine
  modified_base (4)..(4): um
  modified_base (5)..(5): 2'-deoxy-2'-fluoroguanosine
  modified_base (6)..(6): gm
  modified_base (7)..(7): 2'-deoxy-2'-fluoroadenosine
  modified_base (8)..(8): 2'-O-methyladenosine
  modified_base (9)..(9): 2'-deoxy-2'-fluorouridine
  modified_base (10)..(10): gm
  modified_base (11)..(11): 2'-deoxy-2'-fluorocytidine
  modified_base (12)..(12): 2'-deoxy-2'-fluorouridine
  modified_base (13)..(13): 2'-O-methyladenosine
  modified_base (14)..(14): 2'-deoxy-2'-fluorocytidine
  modified_base (15)..(15): 2'-O-methyladenosine
  modified_base (16)..(16): 2'-deoxy-2'-fluorouridine
  modified_base (17)..(17): gm
  modified_base (18)..(18): 2'-deoxy-2'-fluoroguanosine
  modified_base (19)..(19): um
  modified_base (20)..(20): 2'-deoxy-2'-fluoroguanosine
  modified_base (21)..(21): 2'-O-methyladenosine
gaauggaaugcuacaugguga

SEQ ID NO: 5932 - RNA, 21 nt, Artificial Sequence
  siRNA sense strand against b2GPI
  modified_base (1)..(1): 2'-deoxy-2'-fluoroadenosine
  modified_base (2)..(2): 2'-O-methyladenosine
  misc_feature (2)..(3): 5'-phosphonothioate
  modified_base (3)..(3): 2'-deoxy-2'-fluorouridine
  modified_base (4)..(4): gm
  modified_base (5)..(5): 2'-deoxy-2'-fluoroguanosine
  modified_base (6)..(6): 2'-O-methyladenosine
  modified_base (7)..(7): 2'-deoxy-2'-fluoroadenosine
  modified_base (8)..(8): um
  modified_base (9)..(9): 2'-deoxy-2'-fluoroguanosine
  modified_base (10)..(10): cm
  modified_base (11)..(11): 2'-deoxy-2'-fluorouridine
  modified_base (12)..(12): 2'-deoxy-2'-fluoroadenosine
  modified_base (13)..(13): cm
  modified_base (14)..(14): 2'-deoxy-2'-fluoroadenosine
  modified_base (15)..(15): um
  modified_base (16)..(16): 2'-deoxy-2'-fluoroguanosine
  modified_base (17)..(17): gm
  modified_base (18)..(18): 2'-deoxy-2'-fluorouridine
  modified_base (19)..(19): gm
  modified_base (20)..(20): 2'-deoxy-2'-fluoroadenosine
  modified_base (21)..(21): um
aauggaaugcuacauggugau

SEQ ID NO: 5933 - RNA, 21 nt, Artificial Sequence
  siRNA sense strand against b2GPI
  modified_base (1)..(1): 2'-deoxy-2'-fluoroadenosine
  modified_base (2)..(2): um
  misc_feature (2)..(3): 5'-phosphonothioate
  modified_base (3)..(3): 2'-deoxy-2'-fluoroguanosine
  modified_base (4)..(4): gm
  modified_base (5)..(5): 2'-deoxy-2'-fluoroadenosine
  modified_base (6)..(6): 2'-O-methyladenosine
  modified_base (7)..(7): 2'-deoxy-2'-fluorouridine
  modified_base (8)..(8): gm
  modified_base (9)..(9): 2'-deoxy-2'-fluorocytidine
  modified_base (10)..(10): um
  modified_base (11)..(11): 2'-deoxy-2'-fluoroadenosine
  modified_base (12)..(12): 2'-deoxy-2'-fluorocytidine
  modified_base (13)..(13): 2'-O-methyladenosine
  modified_base (14)..(14): 2'-deoxy-2'-fluorouridine
  modified_base (15)..(15): gm
  modified_base (16)..(16): 2'-deoxy-2'-fluoroguanosine
  modified_base (17)..(17): um
  modified_base (18)..(18): 2'-deoxy-2'-fluoroguanosine
  modified_base (19)..(19): 2'-O-methyladenosine
  modified_base (20)..(20): 2'-deoxy-2'-fluorouridine
  modified_base (21)..(21): 2'-O-methyladenosine
auggaaugcuacauggugaua

SEQ ID NO: 5934 - RNA, 21 nt, Artificial Sequence
  siRNA sense strand against b2GPI
  modified_base (1)..(1): 2'-deoxy-2'-fluorouridine
  modified_base (2)..(2): gm
  misc_feature (2)..(3): 5'-phosphonothioate
  modified_base (3)..(3): 2'-deoxy-2'-fluoroguanosine
  modified_base (4)..(4): 2'-O-methyladenosine
  modified_base (5)..(5): 2'-deoxy-2'-fluoroadenosine
  modified_base (6)..(6): um
  modified_base (7)..(7): 2'-deoxy-2'-fluoroguanosine
  modified_base (8)..(8): cm
  modified_base (9)..(9): 2'-deoxy-2'-fluorouridine
  modified_base (10)..(10): 2'-O-methyladenosine
  modified_base (11)..(11): 2'-deoxy-2'-fluorocytidine
  modified_base (12)..(12): 2'-deoxy-2'-fluoroadenosine
  modified_base (13)..(13): um
  modified_base (14)..(14): 2'-deoxy-2'-fluoroguanosine
  modified_base (15)..(15): gm
  modified_base (16)..(16): 2'-deoxy-2'-fluorouridine
  modified_base (17)..(17): gm
  modified_base (18)..(18): 2'-deoxy-2'-fluoroadenosine
  modified_base (19)..(19): um
  modified_base (20)..(20): 2'-deoxy-2'-fluoroadenosine
  modified_base (21)..(21): 2'-O-methyladenosine
uggaaugcuacauggugauaa

SEQ ID NO: 5935 - RNA, 21 nt, Artificial Sequence
  siRNA sense strand against b2GPI
  modified_base (1)..(1): 2'-deoxy-2'-fluoroguanosine
  modified_base (2)..(2): gm
  misc_feature (2)..(3): 5'-phosphonothioate
  modified_base (3)..(3): 2'-deoxy-2'-fluoroadenosine
  modified_base (4)..(4): 2'-O-methyladenosine
  modified_base (5)..(5): 2'-deoxy-2'-fluorouridine
  modified_base (6)..(6): gm
  modified_base (7)..(7): 2'-deoxy-2'-fluorocytidine
  modified_base (8)..(8): um
  modified_base (9)..(9): 2'-deoxy-2'-fluoroadenosine
  modified_base (10)..(10): cm
  modified_base (11)..(11): 2'-deoxy-2'-fluoroadenosine
  modified_base (12)..(12): 2'-deoxy-2'-fluorouridine
  modified_base (13)..(13): gm
  modified_base (14)..(14): 2'-deoxy-2'-fluoroguanosine
  modified_base (15)..(15): um
  modified_base (16)..(16): 2'-deoxy-2'-fluoroguanosine
  modified_base (17)..(17): 2'-O-methyladenosine
  modified_base (18)..(18): 2'-deoxy-2'-fluorouridine
  modified_base (19)..(19): 2'-O-methyladenosine
  modified_base (20)..(20): 2'-deoxy-2'-fluoroadenosine
  modified_base (21)..(21): 2'-O-methyladenosine
ggaaugcuacauggugauaaa

SEQ ID NO: 5936 - RNA, 21 nt, Artificial Sequence
  siRNA sense strand against b2GPI
  modified_base (1)..(1): 2'-deoxy-2'-fluoroadenosine
  modified_base (2)..(2): 2'-O-methyladenosine
  misc_feature (2)..(3): 5'-phosphonothioate
  modified_base (3)..(3): 2'-deoxy-2'-fluorouridine
  modified_base (4)..(4): gm
  modified_base (5)..(5): 2'-deoxy-2'-fluorocytidine
  modified_base (6)..(6): um
  modified_base (7)..(7): 2'-deoxy-2'-fluoroadenosine
  modified_base (8)..(8): cm
  modified_base (9)..(9): 2'-deoxy-2'-fluoroadenosine
  modified_base (10)..(10): um
  modified_base (11)..(11): 2'-deoxy-2'-fluoroguanosine
  modified_base (12)..(12): 2'-deoxy-2'-fluoroguanosine
  modified_base (13)..(13): um
  modified_base (14)..(14): 2'-deoxy-2'-fluoroguanosine
  modified_base (15)..(15): 2'-O-methyladenosine
  modified_base (16)..(16): 2'-deoxy-2'-fluorouridine
  modified_base (17)..(17): 2'-O-methyladenosine
  modified_base (18)..(18): 2'-deoxy-2'-fluoroadenosine
  modified_base (19)..(19): 2'-O-methyladenosine
  modified_base (20)..(20): 2'-deoxy-2'-fluoroguanosine
  modified_base (21)..(21): um
aaugcuacauggugauaaagu

SEQ ID NO: 5937 - RNA, 21 nt, Artificial Sequence
  siRNA sense strand against b2GPI
  modified_base (1)..(1): 2'-deoxy-2'-fluoroadenosine
  modified_base (2)..(2): um
  misc_feature (2)..(3): 5'-phosphonothioate
  modified_base (3)..(3): 2'-deoxy-2'-fluoroguanosine
  modified_base (4)..(4): cm
  modified_base (5)..(5): 2'-deoxy-2'-fluorouridine
  modified_base (6)..(6): 2'-O-methyladenosine
  modified_base (7)..(7): 2'-deoxy-2'-fluorocytidine
  modified_base (8)..(8): 2'-O-methyladenosine
  modified_base (9)..(9): 2'-deoxy-2'-fluorouridine
  modified_base (10)..(10): gm
  modified_base (11)..(11): 2'-deoxy-2'-fluoroguanosine
  modified_base (12)..(12): 2'-deoxy-2'-fluorouridine
  modified_base (13)..(13): gm
  modified_base (14)..(14): 2'-deoxy-2'-fluoroadenosine
  modified_base (15)..(15): um
  modified_base (16)..(16): 2'-deoxy-2'-fluoroadenosine
  modified_base (17)..(17): 2'-O-methyladenosine
  modified_base (18)..(18): 2'-deoxy-2'-fluoroadenosine
  modified_base (19)..(19): gm
  modified_base (20)..(20): 2'-deoxy-2'-fluorouridine
  modified_base (21)..(21): um
augcuacauggugauaaaguu

SEQ ID NO: 5938 - RNA, 21 nt, Artificial Sequence
  siRNA sense strand against b2GPI
  modified_base (1)..(1): 2'-deoxy-2'-fluorouridine
  modified_base (2)..(2): gm
  misc_feature (2)..(3): 5'-phosphonothioate
  modified_base (3)..(3): 2'-deoxy-2'-fluorocytidine
  modified_base (4)..(4): um
  modified_base (5)..(5): 2'-deoxy-2'-fluoroadenosine
  modified_base (6)..(6): cm
  modified_base (7)..(7): 2'-deoxy-2'-fluoroadenosine
  modified_base (8)..(8): um
  modified_base (9)..(9): 2'-deoxy-2'-fluoroguanosine
  modified_base (10)..(10): gm
  modified_base (11)..(11): 2'-deoxy-2'-fluorouridine
  modified_base (12)..(12): 2'-deoxy-2'-fluoroguanosine
  modified_base (13)..(13): 2'-O-methyladenosine
  modified_base (14)..(14): 2'-deoxy-2'-fluorouridine
  modified_base (15)..(15): 2'-O-methyladenosine
  modified_base (16)..(16): 2'-deoxy-2'-fluoroadenosine
  modified_base (17)..(17): 2'-O-methyladenosine
  modified_base (18)..(18): 2'-deoxy-2'-fluoroguanosine
  modified_base (19)..(19): um
  modified_base (20)..(20): 2'-deoxy-2'-fluorouridine
  modified_base (21)..(21): um
ugcuacauggugauaaaguuu

SEQ ID NO: 5939 - RNA, 21 nt, Artificial Sequence
  siRNA sense strand against b2GPI
  modified_base (1)..(1): 2'-deoxy-2'-fluorocytidine
  modified_base (2)..(2): um
  misc_feature (2)..(3): 5'-phosphonothioate
  modified_base (3)..(3): 2'-deoxy-2'-fluoroadenosine
  modified_base (4)..(4): cm
  modified_base (5)..(5): 2'-deoxy-2'-fluoroadenosine
  modified_base (6)..(6): um
  modified_base (7)..(7): 2'-deoxy-2'-fluoroguanosine
  modified_base (8)..(8): gm
  modified_base (9)..(9): 2'-deoxy-2'-fluorouridine
  modified_base (10)..(10): gm
  modified_base (11)..(11): 2'-deoxy-2'-fluoroadenosine
  modified_base (12)..(12): 2'-deoxy-2'-fluorouridine
  modified_base (13)..(13): 2'-O-methyladenosine
  modified_base (14)..(14): 2'-deoxy-2'-fluoroadenosine
  modified_base (15)..(15): 2'-O-methyladenosine
  modified_base (16)..(16): 2'-deoxy-2'-fluoroguanosine
  modified_base (17)..(17): um
  modified_base (18)..(18): 2'-deoxy-2'-fluorouridine
  modified_base (19)..(19): um
  modified_base (20)..(20): 2'-deoxy-2'-fluorocytidine
  modified_base (21)..(21): um
cuacauggugauaaaguuucu

SEQ ID NO: 5940 - RNA, 21 nt, Artificial Sequence
  siRNA sense strand against b2GPI
  modified_base (1)..(1): 2'-deoxy-2'-fluoroadenosine
  modified_base (2)..(2): cm
  misc_feature (2)..(3): 5'-phosphonothioate
  modified_base (3)..(3): 2'-deoxy-2'-fluoroadenosine
  modified_base (4)..(4): um
  modified_base (5)..(5): 2'-deoxy-2'-fluoroguanosine
  modified_base (6)..(6): gm
  modified_base (7)..(7): 2'-deoxy-2'-fluorouridine
  modified_base (8)..(8): gm
  modified_base (9)..(9): 2'-deoxy-2'-fluoroadenosine
  modified_base (10)..(10): um
  modified_base (11)..(11): 2'-deoxy-2'-fluoroadenosine
  modified_base (12)..(12): 2'-deoxy-2'-fluoroadenosine
  modified_base (13)..(13): 2'-O-methyladenosine
  modified_base (14)..(14): 2'-deoxy-2'-fluoroguanosine
  modified_base (15)..(15): um
  modified_base (16)..(16): 2'-deoxy-2'-fluorouridine
  modified_base (17)..(17): um
  modified_base (18)..(18): 2'-deoxy-2'-fluorocytidine
  modified_base (19)..(19): um
  modified_base (20)..(20): 2'-deoxy-2'-fluorouridine
  modified_base (21)..(21): um
acauggugauaaaguuucuuu

SEQ ID NO: 5941 - RNA, 21 nt, Artificial Sequence
  siRNA sense strand against b2GPI
  modified_base (1)..(1): 2'-deoxy-2'-fluoroadenosine
  modified_base (2)..(2): um
  misc_feature (2)..(3): 5'-phosphonothioate
  modified_base (3)..(3): 2'-deoxy-2'-fluoroguanosine
  modified_base (4)..(4): gm
  modified_base (5)..(5): 2'-deoxy-2'-fluorouridine
  modified_base (6)..(6): gm
  modified_base (7)..(7): 2'-deoxy-2'-fluoroadenosine
  modified_base (8)..(8): um
  modified_base (9)..(9): 2'-deoxy-2'-fluoroadenosine
  modified_base (10)..(10): 2'-O-methyladenosine
  modified_base (11)..(11): 2'-deoxy-2'-fluoroadenosine
  modified_base (12)..(12): 2'-deoxy-2'-fluoroguanosine
  modified_base (13)..(13): um
  modified_base (14)..(14): 2'-deoxy-2'-fluorouridine
  modified_base (15)..(15): um
  modified_base (16)..(16): 2'-deoxy-2'-fluorocytidine
  modified_base (17)..(17): um
  modified_base (18)..(18): 2'-deoxy-2'-fluorouridine
  modified_base (19)..(19): um
  modified_base (20)..(20): 2'-deoxy-2'-fluorocytidine
  modified_base (21)..(21): um
auggugauaaaguuucuuucu

SEQ ID NO: 5942 - RNA, 21 nt, Artificial Sequence
  siRNA sense strand against b2GPI
  modified_base (1)..(1): 2'-deoxy-2'-fluorouridine
  modified_base (2)..(2): gm
  misc_feature (2)..(3): 5'-phosphonothioate
  modified_base (3)..(3): 2'-deoxy-2'-fluoroguanosine
  modified_base (4)..(4): um
  modified_base (5)..(5): 2'-deoxy-2'-fluoroguanosine
  modified_base (6)..(6): 2'-O-methyladenosine
  modified_base (7)..(7): 2'-deoxy-2'-fluorouridine
  modified_base (8)..(8): 2'-O-methyladenosine
  modified_base (9)..(9): 2'-deoxy-2'-fluoroadenosine
  modified_base (10)..(10): 2'-O-methyladenosine
  modified_base (11)..(11): 2'-deoxy-2'-fluoroguanosine
  modified_base (12)..(12): 2'-deoxy-2'-fluorouridine
  modified_base (13)..(13): um
  modified_base (14)..(14): 2'-deoxy-2'-fluorouridine
  modified_base (15)..(15): cm
  modified_base (16)..(16): 2'-deoxy-2'-fluorouridine
  modified_base (17)..(17): um
  modified_base (18)..(18): 2'-deoxy-2'-fluorouridine
  modified_base (19)..(19): cm
  modified_base (20)..(20): 2'-deoxy-2'-fluorouridine
  modified_base (21)..(21): um
uggugauaaaguuucuuucuu

SEQ ID NO: 5943 - RNA, 21 nt, Artificial Sequence
  siRNA sense strand against b2GPI
  modified_base (1)..(1): 2'-deoxy-2'-fluoroguanosine
  modified_base (2)..(2): gm
  misc_feature (2)..(3): 5'-phosphonothioate
  modified_base (3)..(3): 2'-deoxy-2'-fluorouridine
  modified_base (4)..(4): gm
  modified_base (5)..(5): 2'-deoxy-2'-fluoroadenosine
  modified_base (6)..(6): um
  modified_base (7)..(7): 2'-deoxy-2'-fluoroadenosine
  modified_base (8)..(8): 2'-O-methyladenosine
  modified_base (9)..(9): 2'-deoxy-2'-fluoroadenosine
  modified_base (10)..(10): gm
  modified_base (11)..(11): 2'-deoxy-2'-fluorouridine
  modified_base (12)..(12): 2'-deoxy-2'-fluorouridine
  modified_base (13)..(13): um
  modified_base (14)..(14): 2'-deoxy-2'-fluorocytidine
  modified_base (15)..(15): um
  modified_base (16)..(16): 2'-deoxy-2'-fluorouridine
  modified_base (17)..(17): um
  modified_base (18)..(18): 2'-deoxy-2'-fluorocytidine
  modified_base (19)..(19): um
  modified_base (20)..(20): 2'-deoxy-2'-fluorouridine
  modified_base (21)..(21): cm
ggugauaaaguuucuuucuuc

SEQ ID NO: 5944 - RNA, 21 nt, Artificial Sequence
  siRNA sense strand against b2GPI
  modified_base (1)..(1): 2'-deoxy-2'-fluoroguanosine
  modified_base (2)..(2): um
  misc_feature (2)..(3): 5'-phosphonothioate
  modified_base (3)..(3): 2'-deoxy-2'-fluoroguanosine
  modified_base (4)..(4): 2'-O-methyladenosine
  modified_base (5)..(5): 2'-deoxy-2'-fluorouridine
  modified_base (6)..(6): 2'-O-methyladenosine
  modified_base (7)..(7): 2'-deoxy-2'-fluoroadenosine
  modified_base (8)..(8): 2'-O-methyladenosine
  modified_base (9)..(9): 2'-deoxy-2'-fluoroguanosine
  modified_base (10)..(10): um
  modified_base (11)..(11): 2'-deoxy-2'-fluorouridine
  modified_base (12)..(12): 2'-deoxy-2'-fluorouridine
  modified_base (13)..(13): cm
  modified_base (14)..(14): 2'-deoxy-2'-fluorouridine
  modified_base (15)..(15): um
  modified_base (16)..(16): 2'-deoxy-2'-fluorouridine
  modified_base (17)..(17): cm
  modified_base (18)..(18): 2'-deoxy-2'-fluorouridine
  modified_base (19)..(19): um
  modified_base (20)..(20): 2'-deoxy-2'-fluorocytidine
  modified_base (21)..(21): um
gugauaaaguuucuuucuucu

SEQ ID NO: 5945 - RNA, 21 nt, Artificial Sequence
  siRNA sense strand against b2GPI
  modified_base (1)..(1): 2'-deoxy-2'-fluoroadenosine
  modified_base (2)..(2): um
  misc_feature (2)..(3): 5'-phosphonothioate
  modified_base (3)..(3): 2'-deoxy-2'-fluoroadenosine
  modified_base (4)..(4): 2'-O-methyladenosine
  modified_base (5)..(5): 2'-deoxy-2'-fluoroadenosine
  modified_base (6)..(6): gm
  modified_base (7)..(7): 2'-deoxy-2'-fluorouridine
  modified_base (8)..(8): um
  modified_base (9)..(9): 2'-deoxy-2'-fluorouridine
  modified_base (10)..(10): cm
  modified_base (11)..(11): 2'-deoxy-2'-fluorouridine
  modified_base (12)..(12): 2'-deoxy-2'-fluorouridine
  modified_base (13)..(13): um
  modified_base (14)..(14): 2'-deoxy-2'-fluorocytidine
  modified_base (15)..(15): um
  modified_base (16)..(16): 2'-deoxy-2'-fluorouridine
  modified_base (17)..(17): cm
  modified_base (18)..(18): 2'-deoxy-2'-fluorouridine
  modified_base (19)..(19): gm
  modified_base (20)..(20): 2'-deoxy-2'-fluorocytidine
  modified_base (21)..(21): 2'-O-methyladenosine
auaaaguuucuuucuucugca

SEQ ID NO: 5946 - RNA, 21 nt, Artificial Sequence
  siRNA sense strand against b2GPI
  modified_base (1)..(1): 2'-deoxy-2'-fluorouridine
  modified_base (2)..(2): 2'-O-methyladenosine
  misc_feature (2)..(3): 5'-phosphonothioate
  modified_base (3)..(3): 2'-deoxy-2'-fluoroadenosine
  modified_base (4)..(4): 2'-O-methyladenosine
  modified_base (5)..(5): 2'-deoxy-2'-fluoroguanosine
  modified_base (6)..(6): um
  modified_base (7)..(7): 2'-deoxy-2'-fluorouridine
  modified_base (8)..(8): um
  modified_base (9)..(9): 2'-deoxy-2'-fluorocytidine
  modified_base (10)..(10): um
  modified_base (11)..(11): 2'-deoxy-2'-fluorouridine
  modified_base (12)..(12): 2'-deoxy-2'-fluorouridine
  modified_base (13)..(13): cm
  modified_base (14)..(14): 2'-deoxy-2'-fluorouridine
  modified_base (15)..(15): um
  modified_base (16)..(16): 2'-deoxy-2'-fluorocytidine
  modified_base (17)..(17): um
  modified_base (18)..(18): 2'-deoxy-2'-fluoroguanosine
  modified_base (19)..(19): cm
  modified_base (20)..(20): 2'-deoxy-2'-fluoroadenosine
  modified_base (21)..(21): 2'-O-methyladenosine
uaaaguuucuuucuucugcaa

SEQ ID NO: 5947 - RNA, 21 nt, Artificial Sequence
  siRNA sense strand against b2GPI
  modified_base (1)..(1): 2'-deoxy-2'-fluoroadenosine
  modified_base (2)..(2): 2'-O-methyladenosine
  misc_feature (2)..(3): 5'-phosphonothioate
  modified_base (3)..(3): 2'-deoxy-2'-fluoroadenosine
  modified_base (4)..(4): gm
  modified_base (5)..(5): 2'-deoxy-2'-fluorouridine
  modified_base (6)..(6): um
  modified_base (7)..(7): 2'-deoxy-2'-fluorouridine
  modified_base (8)..(8): cm
  modified_base (9)..(9): 2'-deoxy-2'-fluorouridine
  modified_base (10)..(10): um
  modified_base (11)..(11): 2'-deoxy-2'-fluorouridine
  modified_base (12)..(12): 2'-deoxy-2'-fluorocytidine
  modified_base (13)..(13): um
  modified_base (14)..(14): 2'-deoxy-2'-fluorouridine
  modified_base (15)..(15): cm
  modified_base (16)..(16): 2'-deoxy-2'-fluorouridine
  modified_base (17)..(17): gm
  modified_base (18)..(18): 2'-deoxy-2'-fluorocytidine
  modified_base (19)..(19): 2'-O-methyladenosine
  modified_base (20)..(20): 2'-deoxy-2'-fluoroadenosine
  modified_base (21)..(21): 2'-O-methyladenosine
aaaguuucuuucuucugcaaa

SEQ ID NO: 5948 - RNA, 21 nt, Artificial Sequence
  siRNA sense strand against b2GPI
  modified_base (1)..(1): 2'-deoxy-2'-fluoroadenosine
  modified_base (2)..(2): 2'-O-methyladenosine
  misc_feature (2)..(3): 5'-phosphonothioate
  modified_base (3)..(3): 2'-deoxy-2'-fluoroguanosine
  modified_base (4)..(4): um
  modified_base (5)..(5): 2'-deoxy-2'-fluorouridine
  modified_base (6)..(6): um
  modified_base (7)..(7): 2'-deoxy-2'-fluorocytidine
  modified_base (8)..(8): um
  modified_base (9)..(9): 2'-deoxy-2'-fluorouridine
  modified_base (10)..(10): um
  modified_base (11)..(11): 2'-deoxy-2'-fluorocytidine
  modified_base (12)..(12): 2'-deoxy-2'-fluorouridine
  modified_base (13)..(13): um
  modified_base (14)..(14): 2'-deoxy-2'-fluorocytidine
  modified_base (15)..(15): um
  modified_base (16)..(16): 2'-deoxy-2'-fluoroguanosine
  modified_base (17)..(17): cm
  modified_base (18)..(18): 2'-deoxy-2'-fluoroadenosine
  modified_base (19)..(19): 2'-O-methyladenosine
  modified_base (20)..(20): 2'-deoxy-2'-fluoroadenosine
  modified_base (21)..(21): 2'-O-methyladenosine
aaguuucuuucuucugcaaaa

SEQ ID NO: 5949 - RNA, 21 nt, Artificial Sequence
  siRNA sense strand against b2GPI
  modified_base (1)..(1): 2'-deoxy-2'-fluoroadenosine
  modified_base (2)..(2): gm
  misc_feature (2)..(3): 5'-phosphonothioate
  modified_base (3)..(3): 2'-deoxy-2'-fluorouridine
  modified_base (4)..(4): um
  modified_base (5)..(5): 2'-deoxy-2'-fluorouridine
  modified_base (6)..(6): cm
  modified_base (7)..(7): 2'-deoxy-2'-fluorouridine
  modified_base (8)..(8): um
  modified_base (9)..(9): 2'-deoxy-2'-fluorouridine
  modified_base (10)..(10): cm
  modified_base (11)..(11): 2'-deoxy-2'-fluorouridine
  modified_base (12)..(12): 2'-deoxy-2'-fluorouridine
  modified_base (13)..(13): cm
  modified_base (14)..(14): 2'-deoxy-2'-fluorouridine
  modified_base (15)..(15): gm
  modified_base (16)..(16): 2'-deoxy-2'-fluorocytidine
  modified_base (17)..(17): 2'-O-methyladenosine
  modified_base (18)..(18): 2'-deoxy-2'-fluoroadenosine
  modified_base (19)..(19): 2'-O-methyladenosine
  modified_base (20)..(20): 2'-deoxy-2'-fluoroadenosine
  modified_base (21)..(21): 2'-O-methyladenosine
aguuucuuucuucugcaaaaa

SEQ ID NO: 5950 - RNA, 21 nt, Artificial Sequence
  siRNA sense strand against b2GPI
  modified_base (1)..(1): 2'-deoxy-2'-fluoroguanosine
  modified_base (2)..(2): um
  misc_feature (2)..(3): 5'-phosphonothioate
  modified_base (3)..(3): 2'-deoxy-2'-fluorouridine
  modified_base (4)..(4): um
  modified_base (5)..(5): 2'-deoxy-2'-fluorocytidine
  modified_base (6)..(6): um
  modified_base (7)..(7): 2'-deoxy-2'-fluorouridine
  modified_base (8)..(8): um
  modified_base (9)..(9): 2'-deoxy-2'-fluorocytidine
  modified_base (10)..(10): um
  modified_base (11)..(11): 2'-deoxy-2'-fluorouridine
  modified_base (12)..(12): 2'-deoxy-2'-fluorocytidine
  modified_base (13)..(13): um
  modified_base (14)..(14): 2'-deoxy-2'-fluoroguanosine
  modified_base (15)..(15): cm
  modified_base (16)..(16): 2'-deoxy-2'-fluoroadenosine
  modified_base (17)..(17): 2'-O-methyladenosine
  modified_base (18)..(18): 2'-deoxy-2'-fluoroadenosine
  modified_base (19)..(19): 2'-O-methyladenosine
  modified_base (20)..(20): 2'-deoxy-2'-fluoroadenosine
  modified_base (21)..(21): um
guuucuuucuucugcaaaaau

SEQ ID NO: 5951 - RNA, 21 nt, Artificial Sequence
  siRNA sense strand against b2GPI
  modified_base (1)..(1): 2'-deoxy-2'-fluorouridine
  modified_base (2)..(2): um
  misc_feature (2)..(3): 5'-phosphonothioate
  modified_base (3)..(3): 2'-deoxy-2'-fluorouridine
  modified_base (4)..(4): cm
  modified_base (5)..(5): 2'-deoxy-2'-fluorouridine
  modified_base (6)..(6): um
  modified_base (7)..(7): 2'-deoxy-2'-fluorouridine
  modified_base (8)..(8): cm
  modified_base (9)..(9): 2'-deoxy-2'-fluorouridine
  modified_base (10)..(10): um
  modified_base (11)..(11): 2'-deoxy-2'-fluorocytidine
  modified_base (12)..(12): 2'-deoxy-2'-fluorouridine
  modified_base (13)..(13): gm
  modified_base (14)..(14): 2'-deoxy-2'-fluorocytidine
  modified_base (15)..(15): 2'-O-methyladenosine
  modified_base (16)..(16): 2'-deoxy-2'-fluoroadenosine
  modified_base (17)..(17): 2'-O-methyladenosine
  modified_base (18)..(18): 2'-deoxy-2'-fluoroadenosine
  modified_base (19)..(19): 2'-O-methyladenosine
  modified_base (20)..(20): 2'-deoxy-2'-fluorouridine
  modified_base (21)..(21): 2'-O-methyladenosine
uuucuuucuucugcaaaaaua

SEQ ID NO: 5952 - RNA, 21 nt, Artificial Sequence
  siRNA sense strand against b2GPI
  modified_base (1)..(1): 2'-deoxy-2'-fluorouridine
  modified_base (2)..(2): um
  misc_feature (2)..(3): 5'-phosphonothioate
  modified_base (3)..(3): 2'-deoxy-2'-fluorocytidine
  modified_base (4)..(4): um
  modified_base (5)..(5): 2'-deoxy-2'-fluorouridine
  modified_base (6)..(6): um
  modified_base (7)..(7): 2'-deoxy-2'-fluorocytidine
  modified_base (8)..(8): um
  modified_base (9)..(9): 2'-deoxy-2'-fluorouridine
  modified_base (10)..(10): cm
  modified_base (11)..(11): 2'-deoxy-2'-fluorouridine
  modified_base (12)..(12): 2'-deoxy-2'-fluoroguanosine
  modified_base (13)..(13): cm
  modified_base (14)..(14): 2'-deoxy-2'-fluoroadenosine
  modified_base (15)..(15): 2'-O-methyladenosine
  modified_base (16)..(16): 2'-deoxy-2'-fluoroadenosine
  modified_base (17)..(17): 2'-O-methyladenosine
  modified_base (18)..(18): 2'-deoxy-2'-fluoroadenosine
  modified_base (19)..(19): um
  modified_base (20)..(20): 2'-deoxy-2'-fluoroadenosine
  modified_base (21)..(21): 2'-O-methyladenosine
uucuuucuucugcaaaaauaa

SEQ ID NO: 5953 - RNA, 21 nt, Artificial Sequence
  siRNA sense strand against b2GPI
  modified_base (1)..(1): 2'-deoxy-2'-fluorouridine
  modified_base (2)..(2): cm
  misc_feature (2)..(3): 5'-phosphonothioate
  modified_base (3)..(3): 2'-deoxy-2'-fluorouridine
  modified_base (4)..(4): um
  modified_base (5)..(5): 2'-deoxy-2'-fluorouridine
  modified_base (6)..(6): cm
  modified_base (7)..(7): 2'-deoxy-2'-fluorouridine
  modified_base (8)..(8): um
  modified_base (9)..(9): 2'-deoxy-2'-fluorocytidine
  modified_base (10)..(10): um
  modified_base (11)..(11): 2'-deoxy-2'-fluoroguanosine
  modified_base (12)..(12): 2'-deoxy-2'-fluorocytidine
  modified_base (13)..(13): 2'-O-methyladenosine
  modified_base (14)..(14): 2'-deoxy-2'-fluoroadenosine
  modified_base (15)..(15): 2'-O-methyladenosine
  modified_base (16)..(16): 2'-deoxy-2'-fluoroadenosine
  modified_base (17)..(17): 2'-O-methyladenosine
  modified_base (18)..(18): 2'-deoxy-2'-fluorouridine
  modified_base (19)..(19): 2'-O-methyladenosine
  modified_base (20)..(20): 2'-deoxy-2'-fluoroadenosine
  modified_base (21)..(21): gm
ucuuucuucugcaaaaauaag

SEQ ID NO: 5954 - RNA, 21 nt, Artificial Sequence
  siRNA sense strand against b2GPI
  modified_base (1)..(1): 2'-deoxy-2'-fluorocytidine
  modified_base (2)..(2): um
  misc_feature (2)..(3): 5'-phosphonothioate
  modified_base (3)..(3): 2'-deoxy-2'-fluorouridine
  modified_base (4)..(4): cm
  modified_base (5)..(5): 2'-deoxy-2'-fluorouridine
  modified_base (6)..(6): gm
  modified_base (7)..(7): 2'-deoxy-2'-fluorocytidine
  modified_base (8)..(8): 2'-O-methyladenosine
  modified_base (9)..(9): 2'-deoxy-2'-fluoroadenosine
  modified_base (10)..(10): 2'-O-methyladenosine
  modified_base (11)..(11): 2'-deoxy-2'-fluoroadenosine
  modified_base (12)..(12): 2'-deoxy-2'-fluoroadenosine
  modified_base (13)..(13): um
  modified_base (14)..(14): 2'-deoxy-2'-fluoroadenosine
  modified_base (15)..(15): 2'-O-methyladenosine
  modified_base (16)..(16): 2'-deoxy-2'-fluoroguanosine
  modified_base (17)..(17): gm
  modified_base (18)..(18): 2'-deoxy-2'-fluoroadenosine
  modified_base (19)..(19): 2'-O-methyladenosine
  modified_base (20)..(20): 2'-deoxy-2'-fluoroadenosine
  modified_base (21)..(21): 2'-O-methyladenosine
cuucugcaaaaauaaggaaaa

SEQ ID NO: 5955 - RNA, 21 nt, Artificial Sequence
  siRNA sense strand against b2GPI
  modified_base (1)..(1): 2'-deoxy-2'-fluorouridine
  modified_base (2)..(2): cm
  misc_feature (2)..(3): 5'-phosphonothioate
  modified_base (3)..(3): 2'-deoxy-2'-fluorouridine
  modified_base (4)..(4): gm
  modified_base (5)..(5): 2'-deoxy-2'-fluorocytidine
  modified_base (6)..(6): 2'-O-methyladenosine
  modified_base (7)..(7): 2'-deoxy-2'-fluoroadenosine
  modified_base (8)..(8): 2'-O-methyladenosine
  modified_base (9)..(9): 2'-deoxy-2'-fluoroadenosine
  modified_base (10)..(10): 2'-O-methyladenosine
  modified_base (11)..(11): 2'-deoxy-2'-fluorouridine
  modified_base (12)..(12): 2'-deoxy-2'-fluoroadenosine
  modified_base (13)..(13): 2'-O-methyladenosine
  modified_base (14)..(14): 2'-deoxy-2'-fluoroguanosine
  modified_base (15)..(15): gm
  modified_base (16)..(16): 2'-deoxy-2'-fluoroadenosine
  modified_base (17)..(17): 2'-O-methyladenosine
  modified_base (18)..(18): 2'-deoxy-2'-fluoroadenosine
  modified_base (19)..(19): 2'-O-methyladenosine
  modified_base (20)..(20): 2'-deoxy-2'-fluoroguanosine
  modified_base (21)..(21): 2'-O-methyladenosine
ucugcaaaaauaaggaaaaga

SEQ ID NO: 5956 - RNA, 21 nt, Artificial Sequence
  siRNA sense strand against b2GPI
  modified_base (1)..(1): 2'-deoxy-2'-fluorocytidine
  modified_base (2)..(2): um
  misc_feature (2)..(3): 5'-phosphonothioate
  modified_base (3)..(3): 2'-deoxy-2'-fluoroguanosine
  modified_base (4)..(4): cm
  modified_base (5)..(5): 2'-deoxy-2'-fluoroadenosine
  modified_base (6)..(6): 2'-O-methyladenosine
  modified_base (7)..(7): 2'-deoxy-2'-fluoroadenosine
  modified_base (8)..(8): 2'-O-methyladenosine
  modified_base (9)..(9): 2'-deoxy-2'-fluoroadenosine
  modified_base (10)..(10): um
  modified_base (11)..(11): 2'-deoxy-2'-fluoroadenosine
  modified_base (12)..(12): 2'-deoxy-2'-fluoroadenosine
  modified_base (13)..(13): gm
  modified_base (14)..(14): 2'-deoxy-2'-fluoroguanosine
  modified_base (15)..(15): 2'-O-methyladenosine
  modified_base (16)..(16): 2'-deoxy-2'-fluoroadenosine
  modified_base (17)..(17): 2'-O-methyladenosine
  modified_base (18)..(18): 2'-deoxy-2'-fluoroadenosine
  modified_base (19)..(19): gm
  modified_base (20)..(20): 2'-deoxy-2'-fluoroadenosine
  modified_base (21)..(21): 2'-O-methyladenosine
cugcaaaaauaaggaaaagaa

SEQ ID NO: 5957 - RNA, 21 nt, Artificial Sequence
  siRNA sense strand against b2GPI
  modified_base (1)..(1): 2'-deoxy-2'-fluorouridine
  modified_base (2)..(2): gm
  misc_feature (2)..(3): 5'-phosphonothioate
  modified_base (3)..(3): 2'-deoxy-2'-fluorocytidine
  modified_base (4)..(4): 2'-O-methyladenosine
  modified_base (5)..(5): 2'-deoxy-2'-fluoroadenosine
  modified_base (6)..(6): 2'-O-methyladenosine
  modified_base (7)..(7): 2'-deoxy-2'-fluoroadenosine
  modified_base (8)..(8): 2'-O-methyladenosine
  modified_base (9)..(9): 2'-deoxy-2'-fluorouridine
  modified_base (10)..(10): 2'-O-methyladenosine
  modified_base (11)..(11): 2'-deoxy-2'-fluoroadenosine
  modified_base (12)..(12): 2'-deoxy-2'-fluoroguanosine
  modified_base (13)..(13): gm
  modified_base (14)..(14): 2'-deoxy-2'-fluoroadenosine
  modified_base (15)..(15): 2'-O-methyladenosine
  modified_base (16)..(16): 2'-deoxy-2'-fluoroadenosine
  modified_base (17)..(17): 2'-O-methyladenosine
  modified_base (18)..(18): 2'-deoxy-2'-fluoroguanosine
  modified_base (19)..(19): 2'-O-methyladenosine
  modified_base (20)..(20): 2'-deoxy-2'-fluoroadenosine
  modified_base (21)..(21): gm
ugcaaaaauaaggaaaagaag

SEQ ID NO: 5958 - RNA, 21 nt, Artificial Sequence
  siRNA sense strand against b2GPI
  modified_base (1)..(1): 2'-deoxy-2'-fluoroadenosine
  modified_base (2)..(2): um
  misc_feature (2)..(3): 5'-phosphonothioate
  modified_base (3)..(3): 2'-deoxy-2'-fluoroadenosine
  modified_base (4)..(4): 2'-O-methyladenosine
  modified_base (5)..(5): 2'-deoxy-2'-fluoroguanosine
  modified_base (6)..(6): gm
  modified_base (7)..(7): 2'-deoxy-2'-fluoroadenosine
  modified_base (8)..(8): 2'-O-methyladenosine
  modified_base (9)..(9): 2'-deoxy-2'-fluoroadenosine
  modified_base (10)..(10): 2'-O-methyladenosine
  modified_base (11)..(11): 2'-deoxy-2'-fluoroguanosine
  modified_base (12)..(12): 2'-deoxy-2'-fluoroadenosine
  modified_base (13)..(13): 2'-O-methyladenosine
  modified_base (14)..(14): 2'-deoxy-2'-fluoroguanosine
  modified_base (15)..(15): um
  modified_base (16)..(16): 2'-deoxy-2'-fluoroguanosine
  modified_base (17)..(17): um
  modified_base (18)..(18): 2'-deoxy-2'-fluoroadenosine
  modified_base (19)..(19): gm
  modified_base (20)..(20): 2'-deoxy-2'-fluorocytidine
  modified_base (21)..(21): um
auaaggaaaagaaguguagcu

SEQ ID NO: 5959 - RNA, 21 nt, Artificial Sequence
  siRNA sense strand against b2GPI
  modified_base (1)..(1): 2'-deoxy-2'-fluorouridine
  modified_base (2)..(2): 2'-O-methyladenosine
  misc_feature (2)..(3): 5'-phosphonothioate
  modified_base (3)..(3): 2'-deoxy-2'-fluoroadenosine
  modified_base (4)..(4): gm
  modified_base (5)..(5): 2'-deoxy-2'-fluoroguanosine
  modified_base (6)..(6): 2'-O-methyladenosine
  modified_base (7)..(7): 2'-deoxy-2'-fluoroadenosine
  modified_base (8)..(8): 2'-O-methyladenosine
  modified_base (9)..(9): 2'-deoxy-2'-fluoroadenosine
  modified_base (10)..(10): gm
  modified_base (11)..(11): 2'-deoxy-2'-fluoroadenosine
  modified_base (12)..(12): 2'-deoxy-2'-fluoroadenosine
  modified_base (13)..(13): gm
  modified_base (14)..(14): 2'-deoxy-2'-fluorouridine
  modified_base (15)..(15): gm
  modified_base (16)..(16): 2'-deoxy-2'-fluorouridine
  modified_base (17)..(17): 2'-O-methyladenosine
  modified_base (18)..(18): 2'-deoxy-2'-fluoroguanosine
  modified_base (19)..(19): cm
  modified_base (20)..(20): 2'-deoxy-2'-fluorouridine
  modified_base (21)..(21): 2'-O-methyladenosine
uaaggaaaagaaguguagcua

SEQ ID NO: 5960 - RNA, 21 nt, Artificial Sequence
  siRNA sense strand against b2GPI
  modified_base (1)..(1): 2'-deoxy-2'-fluoroadenosine
  modified_base (2)..(2): 2'-O-methyladenosine
  misc_feature (2)..(3): 5'-phosphonothioate
  modified_base (3)..(3): 2'-deoxy-2'-fluoroguanosine
  modified_base (4)..(4): gm
  modified_base (5)..(5): 2'-deoxy-2'-fluoroadenosine
  modified_base (6)..(6): 2'-O-methyladenosine
  modified_base (7)..(7): 2'-deoxy-2'-fluoroadenosine
  modified_base (8)..(8): 2'-O-methyladenosine
  modified_base (9)..(9): 2'-deoxy-2'-fluoroguanosine
  modified_base (10)..(10): 2'-O-methyladenosine
  modified_base (11)..(11): 2'-deoxy-2'-fluoroadenosine
  modified_base (12)..(12): 2'-deoxy-2'-fluoroguanosine
  modified_base (13)..(13): um
  modified_base (14)..(14): 2'-deoxy-2'-fluoroguanosine
  modified_base (15)..(15): um
  modified_base (16)..(16): 2'-deoxy-2'-fluoroadenosine
  modified_base (17)..(17): gm
  modified_base (18)..(18): 2'-deoxy-2'-fluorocytidine
  modified_base (19)..(19): um
  modified_base (20)..(20): 2'-deoxy-2'-fluoroadenosine
  modified_base (21)..(21): um
aaggaaaagaaguguagcuau

SEQ ID NO: 5961 - RNA, 21 nt, Artificial Sequence
  siRNA sense strand against b2GPI
  modified_base (1)..(1): 2'-deoxy-2'-fluoroadenosine
  modified_base (2)..(2): gm
  misc_feature (2)..(3): 5'-phosphonothioate
  modified_base (3)..(3): 2'-deoxy-2'-fluoroguanosine
  modified_base (4)..(4): 2'-O-methyladenosine
  modified_base (5)..(5): 2'-deoxy-2'-fluoroadenosine
  modified_base (6)..(6): 2'-O-methyladenosine
  modified_base (7)..(7): 2'-deoxy-2'-fluoroadenosine
  modified_base (8)..(8): gm
  modified_base (9)..(9): 2'-deoxy-2'-fluoroadenosine
  modified_base (10)..(10): 2'-O-methyladenosine
  modified_base (11)..(11): 2'-deoxy-2'-fluoroguanosine
  modified_base (12)..(12): 2'-deoxy-2'-fluorouridine
  modified_base (13)..(13): gm
  modified_base (14)..(14): 2'-deoxy-2'-fluorouridine
  modified_base (15)..(15): 2'-O-methyladenosine
  modified_base (16)..(16): 2'-deoxy-2'-fluoroguanosine
  modified_base (17)..(17): cm
  modified_base (18)..(18): 2'-deoxy-2'-fluorouridine
  modified_base (19)..(19): 2'-O-methyladenosine
  modified_base (20)..(20): 2'-deoxy-2'-fluorouridine
  modified_base (21)..(21): 2'-O-methyladenosine
aggaaaagaaguguagcuaua

SEQ ID NO: 5962 - RNA, 21 nt, Artificial Sequence
  siRNA sense strand against b2GPI
  modified_base (1)..(1): 2'-deoxy-2'-fluoroguanosine
  modified_base (2)..(2): 2'-O-methyladenosine
  misc_feature (2)..(3): 5'-phosphonothioate
  modified_base (3)..(3): 2'-deoxy-2'-fluoroadenosine
  modified_base (4)..(4): 2'-O-methyladenosine
  modified_base (5)..(5): 2'-deoxy-2'-fluoroadenosine
  modified_base (6)..(6): gm
  modified_base (7)..(7): 2'-deoxy-2'-fluoroadenosine
  modified_base (8)..(8): 2'-O-methyladenosine
  modified_base (9)..(9): 2'-deoxy-2'-fluoroguanosine
  modified_base (10)..(10): um
  modified_base (11)..(11): 2'-deoxy-2'-fluoroguanosine
  modified_base (12)..(12): 2'-deoxy-2'-fluorouridine
  modified_base (13)..(13): 2'-O-methyladenosine
  modified_base (14)..(14): 2'-deoxy-2'-fluoroguanosine
  modified_base (15)..(15): cm
  modified_base (16)..(16): 2'-deoxy-2'-fluorouridine
  modified_base (17)..(17): 2'-O-methyladenosine
  modified_base (18)..(18): 2'-deoxy-2'-fluorouridine
  modified_base (19)..(19): 2'-O-methyladenosine
  modified_base (20)..(20): 2'-deoxy-2'-fluorocytidine
  modified_base (21)..(21): 2'-O-methyladenosine
gaaaagaaguguagcuauaca

SEQ ID NO: 5963 - RNA, 21 nt, Artificial Sequence
  siRNA sense strand against b2GPI
  modified_base (1)..(1): 2'-deoxy-2'-fluoroadenosine
  modified_base (2)..(2): 2'-O-methyladenosine
  misc_feature (2)..(3): 5'-phosphonothioate
  modified_base (3)..(3): 2'-deoxy-2'-fluoroguanosine
  modified_base (4)..(4): 2'-O-methyladenosine
  modified_base (5)..(5): 2'-deoxy-2'-fluoroadenosine
  modified_base (6)..(6): gm
  modified_base (7)..(7): 2'-deoxy-2'-fluorouridine
  modified_base (8)..(8): gm
  modified_base (9)..(9): 2'-deoxy-2'-fluorouridine
  modified_base (10)..(10): 2'-O-methyladenosine
  modified_base (11)..(11): 2'-deoxy-2'-fluoroguanosine
  modified_base (12)..(12): 2'-deoxy-2'-fluorocytidine
  modified_base (13)..(13): um
  modified_base (14)..(14): 2'-deoxy-2'-fluoroadenosine
  modified_base (15)..(15): um
  modified_base (16)..(16): 2'-deoxy-2'-fluoroadenosine
  modified_base (17)..(17): cm
  modified_base (18)..(18): 2'-deoxy-2'-fluoroadenosine
  modified_base (19)..(19): gm
  modified_base (20)..(20): 2'-deoxy-2'-fluoroadenosine
  modified_base (21)..(21): gm
aagaaguguagcuauacagag

SEQ ID NO: 5964 - RNA, 21 nt, Artificial Sequence
  siRNA sense strand against b2GPI
  modified_base (1)..(1): 2'-deoxy-2'-fluoroguanosine
  modified_base (2)..(2): 2'-O-methyladenosine
  misc_feature (2)..(3): 5'-phosphonothioate
  modified_base (3)..(3): 2'-deoxy-2'-fluoroadenosine
  modified_base (4)..(4): gm
  modified_base (5)..(5): 2'-deoxy-2'-fluorouridine
  modified_base (6)..(6): gm
  modified_base (7)..(7): 2'-deoxy-2'-fluorouridine
  modified_base (8)..(8): 2'-O-methyladenosine
  modified_base (9)..(9): 2'-deoxy-2'-fluoroguanosine
  modified_base (10)..(10): cm
  modified_base (11)..(11): 2'-deoxy-2'-fluorouridine
  modified_base (12)..(12): 2'-deoxy-2'-fluoroadenosine
  modified_base (13)..(13): um
  modified_base (14)..(14): 2'-deoxy-2'-fluoroadenosine
  modified_base (15)..(15): cm
  modified_base (16)..(16): 2'-deoxy-2'-fluoroadenosine
  modified_base (17)..(17): gm
  modified_base (18)..(18): 2'-deoxy-2'-fluoroadenosine
  modified_base (19)..(19): gm
  modified_base (20)..(20): 2'-deoxy-2'-fluoroguanosine
  modified_base (21)..(21): 2'-O-methyladenosine
gaaguguagcuauacagagga

SEQ ID NO: 5965 - RNA, 21 nt, Artificial Sequence
  siRNA sense strand against b2GPI
  modified_base (1)..(1): 2'-deoxy-2'-fluoroadenosine
  modified_base (2)..(2): 2'-O-methyladenosine
  misc_feature (2)..(3): 5'-phosphonothioate
  modified_base (3)..(3): 2'-deoxy-2'-fluoroguanosine
  modified_base (4)..(4): um
  modified_base (5)..(5): 2'-deoxy-2'-fluoroguanosine
  modified_base (6)..(6): um
  modified_base (7)..(7): 2'-deoxy-2'-fluoroadenosine
  modified_base (8)..(8): gm
  modified_base (9)..(9): 2'-deoxy-2'-fluorocytidine
  modified_base (10)..(10): um
  modified_base (11)..(11): 2'-deoxy-2'-fluoroadenosine
  modified_base (12)..(12): 2'-deoxy-2'-fluorouridine
  modified_base (13)..(13): 2'-O-methyladenosine
  modified_base (14)..(14): 2'-deoxy-2'-fluorocytidine
  modified_base (15)..(15): 2'-O-methyladenosine
  modified_base (16)..(16): 2'-deoxy-2'-fluoroguanosine
  modified_base (17)..(17): 2'-O-methyladenosine
  modified_base (18)..(18): 2'-deoxy-2'-fluoroguanosine
  modified_base (19)..(19): gm
  modified_base (20)..(20): 2'-deoxy-2'-fluoroadenosine
  modified_base (21)..(21): um
aaguguagcuauacagaggau

SEQ ID NO: 5966 - RNA, 21 nt, Artificial Sequence
  siRNA sense strand against b2GPI
  modified_base (1)..(1): 2'-deoxy-2'-fluoroguanosine
  modified_base (2)..(2): um
  misc_feature (2)..(3): 5'-phosphonothioate
  modified_base (3)..(3): 2'-deoxy-2'-fluoroguanosine
  modified_base (4)..(4): um
  modified_base (5)..(5): 2'-deoxy-2'-fluoroadenosine
  modified_base (6)..(6): gm
  modified_base (7)..(7): 2'-deoxy-2'-fluorocytidine
  modified_base (8)..(8): um
  modified_base (9)..(9): 2'-deoxy-2'-fluoroadenosine
  modified_base (10)..(10): um
  modified_base (11)..(11): 2'-deoxy-2'-fluoroadenosine
  modified_base (12)..(12): 2'-deoxy-2'-fluorocytidine
  modified_base (13)..(13): 2'-O-methyladenosine
  modified_base (14)..(14): 2'-deoxy-2'-fluoroguanosine
  modified_base (15)..(15): 2'-O-methyladenosine
  modified_base (16)..(16): 2'-deoxy-2'-fluoroguanosine
  modified_base (17)..(17): gm
  modified_base (18)..(18): 2'-deoxy-2'-fluoroadenosine
  modified_base (19)..(19): um
  modified_base (20)..(20): 2'-deoxy-2'-fluoroguanosine
  modified_base (21)..(21): cm
guguagcuauacagaggaugc

SEQ ID NO: 5967 - RNA, 21 nt, Artificial Sequence
  siRNA sense strand against b2GPI
  modified_base (1)..(1): 2'-deoxy-2'-fluorouridine
  modified_base (2)..(2): gm
  misc_feature (2)..(3): 5'-phosphonothioate
  modified_base (3)..(3): 2'-deoxy-2'-fluorouridine
  modified_base (4)..(4): 2'-O-methyladenosine
  modified_base (5)..(5): 2'-deoxy-2'-fluoroguanosine
  modified_base (6)..(6): cm
  modified_base (7)..(7): 2'-deoxy-2'-fluorouridine
  modified_base (8)..(8): 2'-O-methyladenosine
  modified_base (9)..(9): 2'-deoxy-2'-fluorouridine
  modified_base (10)..(10): 2'-O-methyladenosine
  modified_base (11)..(11): 2'-deoxy-2'-fluorocytidine
  modified_base (12)..(12): 2'-deoxy-2'-fluoroadenosine
  modified_base (13)..(13): gm
  modified_base (14)..(14): 2'-deoxy-2'-fluoroadenosine
  modified_base (15)..(15): gm
  modified_base (16)..(16): 2'-deoxy-2'-fluoroguanosine
  modified_base (17)..(17): 2'-O-methyladenosine
  modified_base (18)..(18): 2'-deoxy-2'-fluorouridine
  modified_base (19)..(19): gm
  modified_base (20)..(20): 2'-deoxy-2'-fluorocytidine
  modified_base (21)..(21): um
uguagcuauacagaggaugcu

SEQ ID NO: 5968 - RNA, 21 nt, Artificial Sequence
  siRNA sense strand against b2GPI
  modified_base (1)..(1): 2'-deoxy-2'-fluorouridine
  modified_base (2)..(2): 2'-O-methyladenosine
  misc_feature (2)..(3): 5'-phosphonothioate
  modified_base (3)..(3): 2'-deoxy-2'-fluoroguanosine
  modified_base (4)..(4): cm
  modified_base (5)..(5): 2'-deoxy-2'-fluorouridine
  modified_base (6)..(6): 2'-O-methyladenosine
  modified_base (7)..(7): 2'-deoxy-2'-fluorouridine
  modified_base (8)..(8): 2'-O-methyladenosine
  modified_base (9)..(9): 2'-deoxy-2'-fluorocytidine
  modified_base (10)..(10): 2'-O-methyladenosine
  modified_base (11)..(11): 2'-deoxy-2'-fluoroguanosine
  modified_base (12)..(12): 2'-deoxy-2'-fluoroadenosine
  modified_base (13)..(13): gm
  modified_base (14)..(14): 2'-deoxy-2'-fluoroguanosine
  modified_base (15)..(15): 2'-O-methyladenosine
  modified_base (16)..(16): 2'-deoxy-2'-fluorouridine
  modified_base (17)..(17): gm
  modified_base (18)..(18): 2'-deoxy-2'-fluorocytidine
  modified_base (19)..(19): um
  modified_base (20)..(20): 2'-deoxy-2'-fluorocytidine
  modified_base (21)..(21): 2'-O-methyladenosine
uagcuauacagaggaugcuca

SEQ ID NO: 5969 - RNA, 21 nt, Artificial Sequence
  siRNA sense strand against b2GPI
  modified_base (1)..(1): 2'-deoxy-2'-fluoroadenosine
  modified_base (2)..(2): gm
  misc_feature (2)..(3): 5'-phosphonothioate
  modified_base (3)..(3): 2'-deoxy-2'-fluorocytidine
  modified_base (4)..(4): um
  modified_base (5)..(5): 2'-deoxy-2'-fluoroadenosine
  modified_base (6)..(6): um
  modified_base (7)..(7): 2'-deoxy-2'-fluoroadenosine
  modified_base (8)..(8): cm
  modified_base (9)..(9): 2'-deoxy-2'-fluoroadenosine
  modified_base (10)..(10): gm
  modified_base (11)..(11): 2'-deoxy-2'-fluoroadenosine
  modified_base (12)..(12): 2'-deoxy-2'-fluoroguanosine
  modified_base (13)..(13): gm
  modified_base (14)..(14): 2'-deoxy-2'-fluoroadenosine
  modified_base (15)..(15): um
  modified_base (16)..(16): 2'-deoxy-2'-fluoroguanosine
  modified_base (17)..(17): cm
  modified_base (18)..(18): 2'-deoxy-2'-fluorouridine
  modified_base (19)..(19): cm
  modified_base (20)..(20): 2'-deoxy-2'-fluoroadenosine
  modified_base (21)..(21): gm
agcuauacagaggaugcucag

SEQ ID NO: 5970 - RNA, 21 nt, Artificial Sequence
  siRNA sense strand against b2GPI
  modified_base (1)..(1): 2'-deoxy-2'-fluoroadenosine
  modified_base (2)..(2): um
  misc_feature (2)..(3): 5'-phosphonothioate
  modified_base (3)..(3): 2'-deoxy-2'-fluoroadenosine
  modified_base (4)..(4): cm
  modified_base (5)..(5): 2'-deoxy-2'-fluoroadenosine
  modified_base (6)..(6): gm
  modified_base (7)..(7): 2'-deoxy-2'-fluoroadenosine
  modified_base (8)..(8): gm
  modified_base (9)..(9): 2'-deoxy-2'-fluoroguanosine
  modified_base (10)..(10): 2'-O-methyladenosine
  modified_base (11)..(11): 2'-deoxy-2'-fluorouridine
  modified_base (12)..(12): 2'-deoxy-2'-fluoroguanosine
  modified_base (13)..(13): cm
  modified_base (14)..(14): 2'-deoxy-2'-fluorouridine
  modified_base (15)..(15): cm
  modified_base (16)..(16): 2'-deoxy-2'-fluoroadenosine
  modified_base (17)..(17): gm
  modified_base (18)..(18): 2'-deoxy-2'-fluorouridine
  modified_base (19)..(19): gm
  modified_base (20)..(20): 2'-deoxy-2'-fluorouridine
  modified_base (21)..(21): 2'-O-methyladenosine
auacagaggaugcucagugua

SEQ ID NO: 5971 - RNA, 21 nt, Artificial Sequence
  siRNA sense strand against b2GPI
  modified_base (1)..(1): 2'-deoxy-2'-fluoroadenosine
  modified_base (2)..(2): cm
  misc_feature (2)..(3): 5'-phosphonothioate
  modified_base (3)..(3): 2'-deoxy-2'-fluoroadenosine
  modified_base (4)..(4): gm
  modified_base (5)..(5): 2'-deoxy-2'-fluoroadenosine
  modified_base (6)..(6): gm
  modified_base (7)..(7): 2'-deoxy-2'-fluoroguanosine
  modified_base (8)..(8): 2'-O-methyladenosine
  modified_base (9)..(9): 2'-deoxy-2'-fluorouridine
  modified_base (10)..(10): gm
  modified_base (11)..(11): 2'-deoxy-2'-fluorocytidine
  modified_base (12)..(12): 2'-deoxy-2'-fluorouridine
  modified_base (13)..(13): cm
  modified_base (14)..(14): 2'-deoxy-2'-fluoroadenosine
  modified_base (15)..(15): gm
  modified_base (16)..(16): 2'-deoxy-2'-fluorouridine
  modified_base (17)..(17): gm
  modified_base (18)..(18): 2'-deoxy-2'-fluorouridine
  modified_base (19)..(19): 2'-O-methyladenosine
  modified_base (20)..(20): 2'-deoxy-2'-fluorouridine
  modified_base (21)..(21): 2'-O-methyladenosine
acagaggaugcucaguguaua

SEQ ID NO: 5972 - RNA, 21 nt, Artificial Sequence
  siRNA sense strand against b2GPI
  modified_base (1)..(1): 2'-deoxy-2'-fluorocytidine
  modified_base (2)..(2): 2'-O-methyladenosine
  misc_feature (2)..(3): 5'-phosphonothioate
  modified_base (3)..(3): 2'-deoxy-2'-fluoroguanosine
  modified_base (4)..(4): 2'-O-methyladenosine
  modified_base (5)..(5): 2'-deoxy-2'-fluoroguanosine
  modified_base (6)..(6): gm
  modified_base (7)..(7): 2'-deoxy-2'-fluoroadenosine
  modified_base (8)..(8): um
  modified_base (9)..(9): 2'-deoxy-2'-fluoroguanosine
  modified_base (10)..(10): cm
  modified_base (11)..(11): 2'-deoxy-2'-fluorouridine
  modified_base (12)..(12): 2'-deoxy-2'-fluorocytidine
  modified_base (13)..(13): 2'-O-methyladenosine
  modified_base (14)..(14): 2'-deoxy-2'-fluoroguanosine
  modified_base (15)..(15): um
  modified_base (16)..(16): 2'-deoxy-2'-fluoroguanosine
  modified_base (17)..(17): um
  modified_base (18)..(18): 2'-deoxy-2'-fluoroadenosine
  modified_base (19)..(19): um
  modified_base (20)..(20): 2'-deoxy-2'-fluoroadenosine
  modified_base (21)..(21): gm
cagaggaugcucaguguauag

SEQ ID NO: 5973 - RNA, 21 nt, Artificial Sequence
  siRNA sense strand against b2GPI
  modified_base (1)..(1): 2'-deoxy-2'-fluoroadenosine
  modified_base (2)..(2): gm
  misc_feature (2)..(3): 5'-phosphonothioate
  modified_base (3)..(3): 2'-deoxy-2'-fluoroadenosine
  modified_base (4)..(4): gm
  modified_base (5)..(5): 2'-deoxy-2'-fluoroguanosine
  modified_base (6)..(6): 2'-O-methyladenosine
  modified_base (7)..(7): 2'-deoxy-2'-fluorouridine
  modified_base (8)..(8): gm
  modified_base (9)..(9): 2'-deoxy-2'-fluorocytidine
  modified_base (10)..(10): um
  modified_base (11)..(11): 2'-deoxy-2'-fluorocytidine
  modified_base (12)..(12): 2'-deoxy-2'-fluoroadenosine
  modified_base (13)..(13): gm
  modified_base (14)..(14): 2'-deoxy-2'-fluorouridine
  modified_base (15)..(15): gm
  modified_base (16)..(16): 2'-deoxy-2'-fluorouridine
  modified_base (17)..(17): 2'-O-methyladenosine
  modified_base (18)..(18): 2'-deoxy-2'-fluorouridine
  modified_base (19)..(19): 2'-O-methyladenosine
  modified_base (20)..(20): 2'-deoxy-2'-fluoroguanosine
  modified_base (21)..(21): 2'-O-methyladenosine
agaggaugcucaguguauaga

SEQ ID NO: 5974 - RNA, 21 nt, Artificial Sequence
  siRNA sense strand against b2GPI
  modified_base (1)..(1): 2'-deoxy-2'-fluoroguanosine
  modified_base (2)..(2): 2'-O-methyladenosine
  misc_feature (2)..(3): 5'-phosphonothioate
  modified_base (3)..(3): 2'-deoxy-2'-fluoroguanosine
  modified_base (4)..(4): gm
  modified_base (5)..(5): 2'-deoxy-2'-fluoroadenosine
  modified_base (6)..(6): um
  modified_base (7)..(7): 2'-deoxy-2'-fluoroguanosine
  modified_base (8)..(8): cm
  modified_base (9)..(9): 2'-deoxy-2'-fluorouridine
  modified_base (10)..(10): cm
  modified_base (11)..(11): 2'-deoxy-2'-fluoroadenosine
  modified_base (12)..(12): 2'-deoxy-2'-fluoroguanosine
  modified_base (13)..(13): um
  modified_base (14)..(14): 2'-deoxy-2'-fluoroguanosine
  modified_base (15)..(15): um
  modified_base (16)..(16): 2'-deoxy-2'-fluoroadenosine
  modified_base (17)..(17): um
  modified_base (18)..(18): 2'-deoxy-2'-fluoroadenosine
  modified_base (19)..(19): gm
  modified_base (20)..(20): 2'-deoxy-2'-fluoroadenosine
  modified_base (21)..(21): um
gaggaugcucaguguauagau

SEQ ID NO: 5975 - RNA, 21 nt, Artificial Sequence
  siRNA sense strand against b2GPI
  modified_base (1)..(1): 2'-deoxy-2'-fluoroadenosine
  modified_base (2)..(2): gm
  misc_feature (2)..(3): 5'-phosphonothioate
  modified_base (3)..(3): 2'-deoxy-2'-fluoroguanosine
  modified_base (4)..(4): 2'-O-methyladenosine
  modified_base (5)..(5): 2'-deoxy-2'-fluorouridine
  modified_base (6)..(6): gm
  modified_base (7)..(7): 2'-deoxy-2'-fluorocytidine
  modified_base (8)..(8): um
  modified_base (9)..(9): 2'-deoxy-2'-fluorocytidine
  modified_base (10)..(10): 2'-O-methyladenosine
  modified_base (11)..(11): 2'-deoxy-2'-fluoroguanosine
  modified_base (12)..(12): 2'-deoxy-2'-fluorouridine
  modified_base (13)..(13): gm
  modified_base (14)..(14): 2'-deoxy-2'-fluorouridine
  modified_base (15)..(15): 2'-O-methyladenosine
  modified_base (16)..(16): 2'-deoxy-2'-fluorouridine
  modified_base (17)..(17): 2'-O-methyladenosine
  modified_base (18)..(18): 2'-deoxy-2'-fluoroguanosine
  modified_base (19)..(19): 2'-O-methyladenosine
  modified_base (20)..(20): 2'-deoxy-2'-fluorouridine
  modified_base (21)..(21): gm
aggaugcucaguguauagaug

SEQ ID NO: 5976 - RNA, 21 nt, Artificial Sequence
  siRNA sense strand against b2GPI
  modified_base (1)..(1): 2'-deoxy-2'-fluoroguanosine
  modified_base (2)..(2): cm
  misc_feature (2)..(3): 5'-phosphonothioate
  modified_base (3)..(3): 2'-deoxy-2'-fluorouridine
  modified_base (4)..(4): cm
  modified_base (5)..(5): 2'-deoxy-2'-fluoroadenosine
  modified_base (6)..(6): gm
  modified_base (7)..(7): 2'-deoxy-2'-fluorouridine
  modified_base (8)..(8): gm
  modified_base (9)..(9): 2'-deoxy-2'-fluorouridine
  modified_base (10)..(10): 2'-O-methyladenosine
  modified_base (11)..(11): 2'-deoxy-2'-fluorouridine
  modified_base (12)..(12): 2'-deoxy-2'-fluoroadenosine
  modified_base (13)..(13): gm
  modified_base (14)..(14): 2'-deoxy-2'-fluoroadenosine
  modified_base (15)..(15): um
  modified_base (16)..(16): 2'-deoxy-2'-fluoroguanosine
  modified_base (17)..(17): gm
  modified_base (18)..(18): 2'-deoxy-2'-fluorocytidine
  modified_base (19)..(19): 2'-O-methyladenosine
  modified_base (20)..(20): 2'-deoxy-2'-fluorocytidine
  modified_base (21)..(21): um
gcucaguguauagauggcacu

SEQ ID NO: 5977 - RNA, 21 nt, Artificial Sequence
  siRNA sense strand against b2GPI
  modified_base (1)..(1): 2'-deoxy-2'-fluorocytidine
  modified_base (2)..(2): um
  misc_feature (2)..(3): 5'-phosphonothioate
  modified_base (3)..(3): 2'-deoxy-2'-fluorocytidine
  modified_base (4)..(4): 2'-O-methyladenosine
  modified_base (5)..(5): 2'-deoxy-2'-fluoroguanosine
  modified_base (6)..(6): um
  modified_base (7)..(7): 2'-deoxy-2'-fluoroguanosine
  modified_base (8)..(8): um
  modified_base (9)..(9): 2'-deoxy-2'-fluoroadenosine
  modified_base (10)..(10): um
  modified_base (11)..(11): 2'-deoxy-2'-fluoroadenosine
  modified_base (12)..(12): 2'-deoxy-2'-fluoroguanosine
  modified_base (13)..(13): 2'-O-methyladenosine
  modified_base (14)..(14): 2'-deoxy-2'-fluorouridine
  modified_base (15)..(15): gm
  modified_base (16)..(16): 2'-deoxy-2'-fluoroguanosine
  modified_base (17)..(17): cm
  modified_base (18)..(18): 2'-deoxy-2'-fluoroadenosine
  modified_base (19)..(19): cm
  modified_base (20)..(20): 2'-deoxy-2'-fluorouridine
  modified_base (21)..(21): 2'-O-methyladenosine
cucaguguauagauggcacua

SEQ ID NO: 5978 - RNA, 21 nt, Artificial Sequence
  siRNA sense strand against b2GPI
  modified_base (1)..(1): 2'-deoxy-2'-fluorouridine
  modified_base (2)..(2): cm
  misc_feature (2)..(3): 5'-phosphonothioate
  modified_base (3)..(3): 2'-deoxy-2'-fluoroadenosine
  modified_base (4)..(4): gm
  modified_base (5)..(5): 2'-deoxy-2'-fluorouridine
  modified_base (6)..(6): gm
  modified_base (7)..(7): 2'-deoxy-2'-fluorouridine
  modified_base (8)..(8): 2'-O-methyladenosine
  modified_base (9)..(9): 2'-deoxy-2'-fluorouridine
  modified_base (10)..(10): 2'-O-methyladenosine
  modified_base (11)..(11): 2'-deoxy-2'-fluoroguanosine
  modified_base (12)..(12): 2'-deoxy-2'-fluoroadenosine
  modified_base (13)..(13): um
  modified_base (14)..(14): 2'-deoxy-2'-fluoroguanosine
  modified_base (15)..(15): gm
  modified_base (16)..(16): 2'-deoxy-2'-fluorocytidine
  modified_base (17)..(17): 2'-O-methyladenosine
  modified_base (18)..(18): 2'-deoxy-2'-fluorocytidine
  modified_base (19)..(19): um
  modified_base (20)..(20): 2'-deoxy-2'-fluoroadenosine
  modified_base (21)..(21): um
ucaguguauagauggcacuau

SEQ ID NO: 5979 - RNA, 21 nt, Artificial Sequence
  siRNA sense strand against b2GPI
  modified_base (1)..(1): 2'-deoxy-2'-fluorocytidine
  modified_base (2)..(2): 2'-O-methyladenosine
  misc_feature (2)..(3): 5'-phosphonothioate
  modified_base (3)..(3): 2'-deoxy-2'-fluoroguanosine
  modified_base (4)..(4): um
  modified_base (5)..(5): 2'-deoxy-2'-fluoroguanosine
  modified_base (6)..(6): um
  modified_base (7)..(7): 2'-deoxy-2'-fluoroadenosine
  modified_base (8)..(8): um
  modified_base (9)..(9): 2'-deoxy-2'-fluoroadenosine
  modified_base (10)..(10): gm
  modified_base (11)..(11): 2'-deoxy-2'-fluoroadenosine
  modified_base (12)..(12): 2'-deoxy-2'-fluorouridine
  modified_base (13)..(13): gm
  modified_base (14)..(14): 2'-deoxy-2'-fluoroguanosine
  modified_base (15)..(15): cm
  modified_base (16)..(16): 2'-deoxy-2'-fluoroadenosine
  modified_base (17)..(17): cm
  modified_base (18)..(18): 2'-deoxy-2'-fluorouridine
  modified_base (19)..(19): 2'-O-methyladenosine
  modified_base (20)..(20): 2'-deoxy-2'-fluorouridine
  modified_base (21)..(21): cm
caguguauagauggcacuauc

SEQ ID NO: 5980 - RNA, 21 nt, Artificial Sequence
  siRNA sense strand against b2GPI
  modified_base (1)..(1): 2'-deoxy-2'-fluoroadenosine
  modified_base (2)..(2): gm
  misc_feature (2)..(3): 5'-phosphonothioate
  modified_base (3)..(3): 2'-deoxy-2'-fluorouridine
  modified_base (4)..(4): gm
  modified_base (5)..(5): 2'-deoxy-2'-fluorouridine
  modified_base (6)..(6): 2'-O-methyladenosine
  modified_base (7)..(7): 2'-deoxy-2'-fluorouridine
  modified_base (8)..(8): 2'-O-methyladenosine
  modified_base (9)..(9): 2'-deoxy-2'-fluoroguanosine
  modified_base (10)..(10): 2'-O-methyladenosine
  modified_base (11)..(11): 2'-deoxy-2'-fluorouridine
  modified_base (12)..(12): 2'-deoxy-2'-fluoroguanosine
  modified_base (13)..(13): gm
  modified_base (14)..(14): 2'-deoxy-2'-fluorocytidine
  modified_base (15)..(15): 2'-O-methyladenosine
  modified_base (16)..(16): 2'-deoxy-2'-fluorocytidine
  modified_base (17)..(17): um
  modified_base (18)..(18): 2'-deoxy-2'-fluoroadenosine
  modified_base (19)..(19): um
  modified_base (20)..(20): 2'-deoxy-2'-fluorocytidine
  modified_base (21)..(21): gm
aguguauagauggcacuaucg

SEQ ID NO: 5981 - RNA, 21 nt, Artificial Sequence
  siRNA sense strand against b2GPI
  modified_base (1)..(1): 2'-deoxy-2'-fluoroguanosine
  modified_base (2)..(2): um
  misc_feature (2)..(3): 5'-phosphonothioate
  modified_base (3)..(3): 2'-deoxy-2'-fluoroguanosine
  modified_base (4)..(4): um
  modified_base (5)..(5): 2'-deoxy-2'-fluoroadenosine
  modified_base (6)..(6): um
  modified_base (7)..(7): 2'-deoxy-2'-fluoroadenosine
  modified_base (8)..(8): gm
  modified_base (9)..(9): 2'-deoxy-2'-fluoroadenosine
  modified_base (10)..(10): um
  modified_base (11)..(11): 2'-deoxy-2'-fluoroguanosine
  modified_base (12)..(12): 2'-deoxy-2'-fluoroguanosine
  modified_base (13)..(13): cm
  modified_base (14)..(14): 2'-deoxy-2'-fluoroadenosine
  modified_base (15)..(15): cm
  modified_base (16)..(16): 2'-deoxy-2'-fluorouridine
  modified_base (17)..(17): 2'-O-methyladenosine
  modified_base (18)..(18): 2'-deoxy-2'-fluorouridine
  modified_base (19)..(19): cm
  modified_base (20)..(20): 2'-deoxy-2'-fluoroguanosine
  modified_base (21)..(21): 2'-O-methyladenosine
guguauagauggcacuaucga

SEQ ID NO: 5982 - RNA, 21 nt, Artificial Sequence
  siRNA sense strand against b2GPI
  modified_base (1)..(1): 2'-deoxy-2'-fluorouridine
  modified_base (2)..(2): gm
  misc_feature (2)..(3): 5'-phosphonothioate
  modified_base (3)..(3): 2'-deoxy-2'-fluorouridine
  modified_base (4)..(4): 2'-O-methyladenosine
  modified_base (5)..(5): 2'-deoxy-2'-fluorouridine
  modified_base (6)..(6): 2'-O-methyladenosine
  modified_base (7)..(7): 2'-deoxy-2'-fluoroguanosine
  modified_base (8)..(8): 2'-O-methyladenosine
  modified_base (9)..(9): 2'-deoxy-2'-fluorouridine
  modified_base (10)..(10): gm
  modified_base (11)..(11): 2'-deoxy-2'-fluoroguanosine
  modified_base (12)..(12): 2'-deoxy-2'-fluorocytidine
  modified_base (13)..(13): 2'-O-methyladenosine
  modified_base (14)..(14): 2'-deoxy-2'-fluorocytidine
  modified_base (15)..(15): um
  modified_base (16)..(16): 2'-deoxy-2'-fluoroadenosine
  modified_base (17)..(17): um
  modified_base (18)..(18): 2'-deoxy-2'-fluorocytidine
  modified_base (19)..(19): gm
  modified_base (20)..(20): 2'-deoxy-2'-fluoroadenosine
  modified_base (21)..(21): 2'-O-methyladenosine
uguauagauggcacuaucgaa

SEQ ID NO: 5983 - RNA, 21 nt, Artificial Sequence
  siRNA sense strand against b2GPI
  modified_base (1)..(1): 2'-deoxy-2'-fluoroguanosine
  modified_base (2)..(2): um
  misc_feature (2)..(3): 5'-phosphonothioate
  modified_base (3)..(3): 2'-deoxy-2'-fluoroadenosine
  modified_base (4)..(4): um
  modified_base (5)..(5): 2'-deoxy-2'-fluoroadenosine
  modified_base (6)..(6): gm
  modified_base (7)..(7): 2'-deoxy-2'-fluoroadenosine
  modified_base (8)..(8): um
  modified_base (9)..(9): 2'-deoxy-2'-fluoroguanosine
  modified_base (10)..(10): gm
  modified_base (11)..(11): 2'-deoxy-2'-fluorocytidine
  modified_base (12)..(12): 2'-deoxy-2'-fluoroadenosine
  modified_base (13)..(13): cm
  modified_base (14)..(14): 2'-deoxy-2'-fluorouridine
  modified_base (15)..(15): 2'-O-methyladenosine
  modified_base (16)..(16): 2'-deoxy-2'-fluorouridine
  modified_base (17)..(17): cm
  modified_base (18)..(18): 2'-deoxy-2'-fluoroguanosine
  modified_base (19)..(19): 2'-O-methyladenosine
  modified_base (20)..(20): 2'-deoxy-2'-fluoroadenosine
  modified_base (21)..(21): gm
guauagauggcacuaucgaag

SEQ ID NO: 5984 - RNA, 21 nt, Artificial Sequence
  siRNA sense strand against b2GPI
  modified_base (1)..(1): 2'-deoxy-2'-fluoroadenosine
  modified_base (2)..(2): um
  misc_feature (2)..(3): 5'-phosphonothioate
  modified_base (3)..(3): 2'-deoxy-2'-fluoroadenosine
  modified_base (4)..(4): gm
  modified_base (5)..(5): 2'-deoxy-2'-fluoroadenosine
  modified_base (6)..(6): um
  modified_base (7)..(7): 2'-deoxy-2'-fluoroguanosine
  modified_base (8)..(8): gm
  modified_base (9)..(9): 2'-deoxy-2'-fluorocytidine
  modified_base (10)..(10): 2'-O-methyladenosine
  modified_base (11)..(11): 2'-deoxy-2'-fluorocytidine
  modified_base (12)..(12): 2'-deoxy-2'-fluorouridine
  modified_base (13)..(13): 2'-O-methyladenosine
  modified_base (14)..(14): 2'-deoxy-2'-fluorouridine
  modified_base (15)..(15): cm
  modified_base (16)..(16): 2'-deoxy-2'-fluoroguanosine
  modified_base (17)..(17): 2'-O-methyladenosine
  modified_base (18)..(18): 2'-deoxy-2'-fluoroadenosine
  modified_base (19)..(19): gm
  modified_base (20)..(20): 2'-deoxy-2'-fluorouridine
  modified_base (21)..(21): cm
auagauggcacuaucgaaguc

SEQ ID NO: 5985 - RNA, 21 nt, Artificial Sequence
  siRNA sense strand against b2GPI
  modified_base (1)..(1): 2'-deoxy-2'-fluoroadenosine
  modified_base (2)..(2): gm
  misc_feature (2)..(3): 5'-phosphonothioate
  modified_base (3)..(3): 2'-deoxy-2'-fluoroadenosine
  modified_base (4)..(4): um
  modified_base (5)..(5): 2'-deoxy-2'-fluoroguanosine
  modified_base (6)..(6): gm
  modified_base (7)..(7): 2'-deoxy-2'-fluorocytidine
  modified_base (8)..(8): 2'-O-methyladenosine
  modified_base (9)..(9): 2'-deoxy-2'-fluorocytidine
  modified_base (10)..(10): um
  modified_base (11)..(11): 2'-deoxy-2'-fluoroadenosine
  modified_base (12)..(12): 2'-deoxy-2'-fluorouridine
  modified_base (13)..(13): cm
  modified_base (14)..(14): 2'-deoxy-2'-fluoroguanosine
  modified_base (15)..(15): 2'-O-methyladenosine
  modified_base (16)..(16): 2'-deoxy-2'-fluoroadenosine
  modified_base (17)..(17): gm
  modified_base (18)..(18): 2'-deoxy-2'-fluorouridine
  modified_base (19)..(19): cm
  modified_base (20)..(20): 2'-deoxy-2'-fluorocytidine
  modified_base (21)..(21): cm
agauggcacuaucgaaguccc

SEQ ID NO: 5986 - RNA, 21 nt, Artificial Sequence
  siRNA sense strand against b2GPI
  modified_base (1)..(1): 2'-deoxy-2'-fluoroadenosine
  modified_base (2)..(2): um
  misc_feature (2)..(3): 5'-phosphonothioate
  modified_base (3)..(3): 2'-deoxy-2'-fluoroguanosine
  modified_base (4)..(4): gm
  modified_base (5)..(5): 2'-deoxy-2'-fluorocytidine
  modified_base (6)..(6): 2'-O-methyladenosine
  modified_base (7)..(7): 2'-deoxy-2'-fluorocytidine
  modified_base (8)..(8): um
  modified_base (9)..(9): 2'-deoxy-2'-fluoroadenosine
  modified_base (10)..(10): um
  modified_base (11)..(11): 2'-deoxy-2'-fluorocytidine
  modified_base (12)..(12): 2'-deoxy-2'-fluoroguanosine
  modified_base (13)..(13): 2'-O-methyladenosine
  modified_base (14)..(14): 2'-deoxy-2'-fluoroadenosine
  modified_base (15)..(15): gm
  modified_base (16)..(16): 2'-deoxy-2'-fluorouridine
  modified_base (17)..(17): cm
  modified_base (18)..(18): 2'-deoxy-2'-fluorocytidine
  modified_base (19)..(19): cm
  modified_base (20)..(20): 2'-deoxy-2'-fluorocytidine
  modified_base (21)..(21): 2'-O-methyladenosine
auggcacuaucgaagucccca

SEQ ID NO: 5987 - RNA, 21 nt, Artificial Sequence
  siRNA sense strand against b2GPI
  modified_base (1)..(1): 2'-deoxy-2'-fluorouridine
  modified_base (2)..(2): gm
  misc_feature (2)..(3): 5'-phosphonothioate
  modified_base (3)..(3): 2'-deoxy-2'-fluoroguanosine
  modified_base (4)..(4): cm
  modified_base (5)..(5): 2'-deoxy-2'-fluoroadenosine
  modified_base (6)..(6): cm
  modified_base (7)..(7): 2'-deoxy-2'-fluorouridine
  modified_base (8)..(8): 2'-O-methyladenosine
  modified_base (9)..(9): 2'-deoxy-2'-fluorouridine
  modified_base (10)..(10): cm
  modified_base (11)..(11): 2'-deoxy-2'-fluoroguanosine
  modified_base (12)..(12): 2'-deoxy-2'-fluoroadenosine
  modified_base (13)..(13): 2'-O-methyladenosine
  modified_base (14)..(14): 2'-deoxy-2'-fluoroguanosine
  modified_base (15)..(15): um
  modified_base (16)..(16): 2'-deoxy-2'-fluorocytidine
  modified_base (17)..(17): cm
  modified_base (18)..(18): 2'-deoxy-2'-fluorocytidine
  modified_base (19)..(19): cm
  modified_base (20)..(20): 2'-deoxy-2'-fluoroadenosine
  modified_base (21)..(21): 2'-O-methyladenosine
uggcacuaucgaaguccccaa

SEQ ID NO: 5988 - RNA, 21 nt, Artificial Sequence
  siRNA sense strand against b2GPI
  modified_base (1)..(1): 2'-deoxy-2'-fluoroguanosine
  modified_base (2)..(2): gm
  misc_feature (2)..(3): 5'-phosphonothioate
  modified_base (3)..(3): 2'-deoxy-2'-fluorocytidine
  modified_base (4)..(4): 2'-O-methyladenosine
  modified_base (5)..(5): 2'-deoxy-2'-fluorocytidine
  modified_base (6)..(6): um
  modified_base (7)..(7): 2'-deoxy-2'-fluoroadenosine
  modified_base (8)..(8): um
  modified_base (9)..(9): 2'-deoxy-2'-fluorocytidine
  modified_base (10)..(10): gm
  modified_base (11)..(11): 2'-deoxy-2'-fluoroadenosine
  modified_base (12)..(12): 2'-deoxy-2'-fluoroadenosine
  modified_base (13)..(13): gm
  modified_base (14)..(14): 2'-deoxy-2'-fluorouridine
  modified_base (15)..(15): cm
  modified_base (16)..(16): 2'-deoxy-2'-fluorocytidine
  modified_base (17)..(17): cm
  modified_base (18)..(18): 2'-deoxy-2'-fluorocytidine
  modified_base (19)..(19): 2'-O-methyladenosine
  modified_base (20)..(20): 2'-deoxy-2'-fluoroadenosine
  modified_base (21)..(21): 2'-O-methyladenosine
ggcacuaucgaaguccccaaa

SEQ ID NO: 5989 - RNA, 21 nt, Artificial Sequence
  siRNA sense strand against b2GPI
  modified_base (1)..(1): 2'-deoxy-2'-fluorocytidine
  modified_base (2)..(2): 2'-O-methyladenosine
  misc_feature (2)..(3): 5'-phosphonothioate
  modified_base (3)..(3): 2'-deoxy-2'-fluorocytidine
  modified_base (4)..(4): um
  modified_base (5)..(5): 2'-deoxy-2'-fluoroadenosine
  modified_base (6)..(6): um
  modified_base (7)..(7): 2'-deoxy-2'-fluorocytidine
  modified_base (8)..(8): gm
  modified_base (9)..(9): 2'-deoxy-2'-fluoroadenosine
  modified_base (10)..(10): 2'-O-methyladenosine
  modified_base (11)..(11): 2'-deoxy-2'-fluoroguanosine
  modified_base (12)..(12): 2'-deoxy-2'-fluorouridine
  modified_base (13)..(13): cm
  modified_base (14)..(14): 2'-deoxy-2'-fluorocytidine
  modified_base (15)..(15): cm
  modified_base (16)..(16): 2'-deoxy-2'-fluorocytidine
  modified_base (17)..(17): 2'-O-methyladenosine
  modified_base (18)..(18): 2'-deoxy-2'-fluoroadenosine
  modified_base (19)..(19): 2'-O-methyladenosine
  modified_base (20)..(20): 2'-deoxy-2'-fluorouridine
  modified_base (21)..(21): gm
cacuaucgaaguccccaaaug

SEQ ID NO: 5990 - RNA, 21 nt, Artificial Sequence
  siRNA sense strand against b2GPI
  modified_base (1)..(1): 2'-deoxy-2'-fluorocytidine
  modified_base (2)..(2): um
  misc_feature (2)..(3): 5'-phosphonothioate
  modified_base (3)..(3): 2'-deoxy-2'-fluoroadenosine
  modified_base (4)..(4): um
  modified_base (5)..(5): 2'-deoxy-2'-fluorocytidine
  modified_base (6)..(6): gm
  modified_base (7)..(7): 2'-deoxy-2'-fluoroadenosine
  modified_base (8)..(8): 2'-O-methyladenosine
  modified_base (9)..(9): 2'-deoxy-2'-fluoroguanosine
  modified_base (10)..(10): um
  modified_base (11)..(11): 2'-deoxy-2'-fluorocytidine
  modified_base (12)..(12): 2'-deoxy-2'-fluorocytidine
  modified_base (13)..(13): cm
  modified_base (14)..(14): 2'-deoxy-2'-fluorocytidine
  modified_base (15)..(15): 2'-O-methyladenosine
  modified_base (16)..(16): 2'-deoxy-2'-fluoroadenosine
  modified_base (17)..(17): 2'-O-methyladenosine
  modified_base (18)..(18): 2'-deoxy-2'-fluorouridine
  modified_base (19)..(19): gm
  modified_base (20)..(20): 2'-deoxy-2'-fluorocytidine
  modified_base (21)..(21): um
cuaucgaaguccccaaaugcu

SEQ ID NO: 5991 - RNA, 21 nt, Artificial Sequence
  siRNA sense strand against b2GPI
  modified_base (1)..(1): 2'-deoxy-2'-fluorouridine
  modified_base (2)..(2): 2'-O-methyladenosine
  misc_feature (2)..(3): 5'-phosphonothioate
  modified_base (3)..(3): 2'-deoxy-2'-fluorouridine
  modified_base (4)..(4): cm
  modified_base (5)..(5): 2'-deoxy-2'-fluoroguanosine
  modified_base (6)..(6): 2'-O-methyladenosine
  modified_base (7)..(7): 2'-deoxy-2'-fluoroadenosine
  modified_base (8)..(8): gm
  modified_base (9)..(9): 2'-deoxy-2'-fluorouridine
  modified_base (10)..(10): cm
  modified_base (11)..(11): 2'-deoxy-2'-fluorocytidine
  modified_base (12)..(12): 2'-deoxy-2'-fluorocytidine
  modified_base (13)..(13): cm
  modified_base (14)..(14): 2'-deoxy-2'-fluoroadenosine
  modified_base (15)..(15): 2'-O-methyladenosine
  modified_base (16)..(16): 2'-deoxy-2'-fluoroadenosine
  modified_base (17)..(17): um
  modified_base (18)..(18): 2'-deoxy-2'-fluoroguanosine
  modified_base (19)..(19): cm
  modified_base (20)..(20): 2'-deoxy-2'-fluorouridine
  modified_base (21)..(21): um
uaucgaaguccccaaaugcuu

SEQ ID NO: 5992 - RNA, 21 nt, Artificial Sequence
  siRNA sense strand against b2GPI
  modified_base (1)..(1): 2'-deoxy-2'-fluoroadenosine
  modified_base (2)..(2): um
  misc_feature (2)..(3): 5'-phosphonothioate
  modified_base (3)..(3): 2'-deoxy-2'-fluorocytidine
  modified_base (4)..(4): gm
  modified_base (5)..(5): 2'-deoxy-2'-fluoroadenosine
  modified_base (6)..(6): 2'-O-methyladenosine
  modified_base (7)..(7): 2'-deoxy-2'-fluoroguanosine
  modified_base (8)..(8): um
  modified_base (9)..(9): 2'-deoxy-2'-fluorocytidine
  modified_base (10)..(10): cm
  modified_base (11)..(11): 2'-deoxy-2'-fluorocytidine
  modified_base (12)..(12): 2'-deoxy-2'-fluorocytidine
  modified_base (13)..(13): 2'-O-methyladenosine
  modified_base (14)..(14): 2'-deoxy-2'-fluoroadenosine
  modified_base (15)..(15): 2'-O-methyladenosine
  modified_base (16)..(16): 2'-deoxy-2'-fluorouridine
  modified_base (17)..(17): gm
  modified_base (18)..(18): 2'-deoxy-2'-fluorocytidine
  modified_base (19)..(19): um
  modified_base (20)..(20): 2'-deoxy-2'-fluorouridine
  modified_base (21)..(21): cm
aucgaaguccccaaaugcuuc

SEQ ID NO: 5993 - RNA, 21 nt, Artificial Sequence
  siRNA sense strand against b2GPI
  modified_base (1)..(1): 2'-deoxy-2'-fluorouridine
  modified_base (2)..(2): cm
  misc_feature (2)..(3): 5'-phosphonothioate
  modified_base (3)..(3): 2'-deoxy-2'-fluoroguanosine
  modified_base (4)..(4): 2'-O-methyladenosine
  modified_base (5)..(5): 2'-deoxy-2'-fluoroadenosine
  modified_base (6)..(6): gm
  modified_base (7)..(7): 2'-deoxy-2'-fluorouridine
  modified_base (8)..(8): cm
  modified_base (9)..(9): 2'-deoxy-2'-fluorocytidine
  modified_base (10)..(10): cm
  modified_base (11)..(11): 2'-deoxy-2'-fluorocytidine
  modified_base (12)..(12): 2'-deoxy-2'-fluoroadenosine
  modified_base (13)..(13): 2'-O-methyladenosine
  modified_base (14)..(14): 2'-deoxy-2'-fluoroadenosine
  modified_base (15)..(15): um
  modified_base (16)..(16): 2'-deoxy-2'-fluoroguanosine
  modified_base (17)..(17): cm
  modified_base (18)..(18): 2'-deoxy-2'-fluorouridine
  modified_base (19)..(19): um
  modified_base (20)..(20): 2'-deoxy-2'-fluorocytidine
  modified_base (21)..(21): 2'-O-methyladenosine
ucgaaguccccaaaugcuuca

SEQ ID NO: 5994 - RNA, 21 nt, Artificial Sequence
  siRNA sense strand against b2GPI
  modified_base (1)..(1): 2'-deoxy-2'-fluoroadenosine
  modified_base (2)..(2): 2'-O-methyladenosine
  misc_feature (2)..(3): 5'-phosphonothioate
  modified_base (3)..(3): 2'-deoxy-2'-fluoroguanosine
  modified_base (4)..(4): um
  modified_base (5)..(5): 2'-deoxy-2'-fluorocytidine
  modified_base (6)..(6): cm
  modified_base (7)..(7): 2'-deoxy-2'-fluorocytidine
  modified_base (8)..(8): cm
  modified_base (9)..(9): 2'-deoxy-2'-fluoroadenosine
  modified_base (10)..(10): 2'-O-methyladenosine
  modified_base (11)..(11): 2'-deoxy-2'-fluoroadenosine
  modified_base (12)..(12): 2'-deoxy-2'-fluorouridine
  modified_base (13)..(13): gm
  modified_base (14)..(14): 2'-deoxy-2'-fluorocytidine
  modified_base (15)..(15): um
  modified_base (16)..(16): 2'-deoxy-2'-fluorouridine
  modified_base (17)..(17): cm
  modified_base (18)..(18): 2'-deoxy-2'-fluoroadenosine
  modified_base (19)..(19): 2'-O-methyladenosine
  modified_base (20)..(20): 2'-deoxy-2'-fluoroguanosine
  modified_base (21)..(21): gm
aaguccccaaaugcuucaagg

SEQ ID NO: 5995 - RNA, 21 nt, Artificial Sequence
  siRNA sense strand against b2GPI
  modified_base (1)..(1): 2'-deoxy-2'-fluoroadenosine
  modified_base (2)..(2): gm
  misc_feature (2)..(3): 5'-phosphonothioate
  modified_base (3)..(3): 2'-deoxy-2'-fluorouridine
  modified_base (4)..(4): cm
  modified_base (5)..(5): 2'-deoxy-2'-fluorocytidine
  modified_base (6)..(6): cm
  modified_base (7)..(7): 2'-deoxy-2'-fluorocytidine
  modified_base (8)..(8): 2'-O-methyladenosine
  modified_base (9)..(9): 2'-deoxy-2'-fluoroadenosine
  modified_base (10)..(10): 2'-O-methyladenosine
  modified_base (11)..(11): 2'-deoxy-2'-fluorouridine
  modified_base (12)..(12): 2'-deoxy-2'-fluoroguanosine
  modified_base (13)..(13): cm
  modified_base (14)..(14): 2'-deoxy-2'-fluorouridine
  modified_base (15)..(15): um
  modified_base (16)..(16): 2'-deoxy-2'-fluorocytidine
  modified_base (17)..(17): 2'-O-methyladenosine
  modified_base (18)..(18): 2'-deoxy-2'-fluoroadenosine
  modified_base (19)..(19): gm
  modified_base (20)..(20): 2'-deoxy-2'-fluoroguanosine
  modified_base (21)..(21): 2'-O-methyladenosine
aguccccaaaugcuucaagga

SEQ ID NO: 5996 - RNA, 21 nt, Artificial Sequence
  siRNA sense strand against b2GPI
  modified_base (1)..(1): 2'-deoxy-2'-fluoroguanosine
  modified_base (2)..(2): um
  misc_feature (2)..(3): 5'-phosphonothioate
  modified_base (3)..(3): 2'-deoxy-2'-fluorocytidine
  modified_base (4)..(4): cm
  modified_base (5)..(5): 2'-deoxy-2'-fluorocytidine
  modified_base (6)..(6): cm
  modified_base (7)..(7): 2'-deoxy-2'-fluoroadenosine
  modified_base (8)..(8): 2'-O-methyladenosine
  modified_base (9)..(9): 2'-deoxy-2'-fluoroadenosine
  modified_base (10)..(10): um
  modified_base (11)..(11): 2'-deoxy-2'-fluoroguanosine
  modified_base (12)..(12): 2'-deoxy-2'-fluorocytidine
  modified_base (13)..(13): um
  modified_base (14)..(14): 2'-deoxy-2'-fluorouridine
  modified_base (15)..(15): cm
  modified_base (16)..(16): 2'-deoxy-2'-fluoroadenosine
  modified_base (17)..(17): 2'-O-methyladenosine
  modified_base (18)..(18): 2'-deoxy-2'-fluoroguanosine
  modified_base (19)..(19): gm
  modified_base (20)..(20): 2'-deoxy-2'-fluoroadenosine
  modified_base (21)..(21): 2'-O-methyladenosine
guccccaaaugcuucaaggaa

SEQ ID NO: 5997 - RNA, 21 nt, Artificial Sequence
  siRNA sense strand against b2GPI
  modified_base (1)..(1): 2'-deoxy-2'-fluorouridine
  modified_base (2)..(2): cm
  misc_feature (2)..(3): 5'-phosphonothioate
  modified_base (3)..(3): 2'-deoxy-2'-fluorocytidine
  modified_base (4)..(4): cm
  modified_base (5)..(5): 2'-deoxy-2'-fluorocytidine
  modified_base (6)..(6): 2'-O-methyladenosine
  modified_base (7)..(7): 2'-deoxy-2'-fluoroadenosine
  modified_base (8)..(8): 2'-O-methyladenosine
  modified_base (9)..(9): 2'-deoxy-2'-fluorouridine
  modified_base (10)..(10): gm
  modified_base (11)..(11): 2'-deoxy-2'-fluorocytidine
  modified_base (12)..(12): 2'-deoxy-2'-fluorouridine
  modified_base (13)..(13): um
  modified_base (14)..(14): 2'-deoxy-2'-fluorocytidine
  modified_base (15)..(15): 2'-O-methyladenosine
  modified_base (16)..(16): 2'-deoxy-2'-fluoroadenosine
  modified_base (17)..(17): gm
  modified_base (18)..(18): 2'-deoxy-2'-fluoroguanosine
  modified_base (19)..(19): 2'-O-methyladenosine
  modified_base (20)..(20): 2'-deoxy-2'-fluoroadenosine
  modified_base (21)..(21): cm
uccccaaaugcuucaaggaac

SEQ ID NO: 5998 - RNA, 21 nt, Artificial Sequence
  siRNA sense strand against b2GPI
  modified_base (1)..(1): 2'-deoxy-2'-fluorocytidine
  modified_base (2)..(2): cm
  misc_feature (2)..(3): 5'-phosphonothioate
  modified_base (3)..(3): 2'-deoxy-2'-fluorocytidine
  modified_base (4)..(4): cm
  modified_base (5)..(5): 2'-deoxy-2'-fluoroadenosine
  modified_base (6)..(6): 2'-O-methyladenosine
  modified_base (7)..(7): 2'-deoxy-2'-fluoroadenosine
  modified_base (8)..(8): um
  modified_base (9)..(9): 2'-deoxy-2'-fluoroguanosine
  modified_base (10)..(10): cm
  modified_base (11)..(11): 2'-deoxy-2'-fluorouridine
  modified_base (12)..(12): 2'-deoxy-2'-fluorouridine
  modified_base (13)..(13): cm
  modified_base (14)..(14): 2'-deoxy-2'-fluoroadenosine
  modified_base (15)..(15): 2'-O-methyladenosine
  modified_base (16)..(16): 2'-deoxy-2'-fluoroguanosine
  modified_base (17)..(17): gm
  modified_base (18)..(18): 2'-deoxy-2'-fluoroadenosine
  modified_base (19)..(19): 2'-O-methyladenosine
  modified_base (20)..(20): 2'-deoxy-2'-fluorocytidine
  modified_base (21)..(21): 2'-O-methyladenosine
ccccaaaugcuucaaggaaca

SEQ ID NO: 5999 - RNA, 21 nt, Artificial Sequence
  siRNA sense strand against b2GPI
  modified_base (1)..(1): 2'-deoxy-2'-fluorocytidine
  modified_base (2)..(2): cm
  misc_feature (2)..(3): 5'-phosphonothioate
  modified_base (3)..(3): 2'-deoxy-2'-fluorocytidine
  modified_base (4)..(4): 2'-O-methyladenosine
  modified_base (5)..(5): 2'-deoxy-2'-fluoroadenosine
  modified_base (6)..(6): 2'-O-methyladenosine
  modified_base (7)..(7): 2'-deoxy-2'-fluorouridine
  modified_base (8)..(8): gm
  modified_base (9)..(9): 2'-deoxy-2'-fluorocytidine
  modified_base (10)..(10): um
  modified_base (11)..(11): 2'-deoxy-2'-fluorouridine
  modified_base (12)..(12): 2'-deoxy-2'-fluorocytidine
  modified_base (13)..(13): 2'-O-methyladenosine
  modified_base (14)..(14): 2'-deoxy-2'-fluoroadenosine
  modified_base (15)..(15): gm
  modified_base (16)..(16): 2'-deoxy-2'-fluoroguanosine
  modified_base (17)..(17): 2'-O-methyladenosine
  modified_base (18)..(18): 2'-deoxy-2'-fluoroadenosine
  modified_base (19)..(19): cm
  modified_base (20)..(20): 2'-deoxy-2'-fluoroadenosine
  modified_base (21)..(21): cm
cccaaaugcuucaaggaacac

SEQ ID NO: 6000 - RNA, 21 nt, Artificial Sequence
  siRNA sense strand against b2GPI
  modified_base (1)..(1): 2'-deoxy-2'-fluorocytidine
  modified_base (2)..(2): cm
  misc_feature (2)..(3): 5'-phosphonothioate
  modified_base (3)..(3): 2'-deoxy-2'-fluoroadenosine
  modified_base (4)..(4): 2'-O-methyladenosine
  modified_base (5)..(5): 2'-deoxy-2'-fluoroadenosine
  modified_base (6)..(6): um
  modified_base (7)..(7): 2'-deoxy-2'-fluoroguanosine
  modified_base (8)..(8): cm
  modified_base (9)..(9): 2'-deoxy-2'-fluorouridine
  modified_base (10)..(10): um
  modified_base (11)..(11): 2'-deoxy-2'-fluorocytidine
  modified_base (12)..(12): 2'-deoxy-2'-fluoroadenosine
  modified_base (13)..(13): 2'-O-methyladenosine
  modified_base (14)..(14): 2'-deoxy-2'-fluoroguanosine
  modified_base (15)..(15): gm
  modified_base (16)..(16): 2'-deoxy-2'-fluoroadenosine
  modified_base (17)..(17): 2'-O-methyladenosine
  modified_base (18)..(18): 2'-deoxy-2'-fluorocytidine
  modified_base (19)..(19): 2'-O-methyladenosine
  modified_base (20)..(20): 2'-deoxy-2'-fluorocytidine
  modified_base (21)..(21): 2'-O-methyladenosine
ccaaaugcuucaaggaacaca

SEQ ID NO: 6001 - RNA, 21 nt, Artificial Sequence
  siRNA sense strand against b2GPI
  modified_base (1)..(1): 2'-deoxy-2'-fluorocytidine
  modified_base (2)..(2): 2'-O-methyladenosine
  misc_feature (2)..(3): 5'-phosphonothioate
  modified_base (3)..(3): 2'-deoxy-2'-fluoroadenosine
  modified_base (4)..(4): 2'-O-methyladenosine
  modified_base (5)..(5): 2'-deoxy-2'-fluorouridine
  modified_base (6)..(6): gm
  modified_base (7)..(7): 2'-deoxy-2'-fluorocytidine
  modified_base (8)..(8): um
  modified_base (9)..(9): 2'-deoxy-2'-fluorouridine
  modified_base (10)..(10): cm
  modified_base (11)..(11): 2'-deoxy-2'-fluoroadenosine
  modified_base (12)..(12): 2'-deoxy-2'-fluoroadenosine
  modified_base (13)..(13): gm
  modified_base (14)..(14): 2'-deoxy-2'-fluoroguanosine
  modified_base (15)..(15): 2'-O-methyladenosine
  modified_base (16)..(16): 2'-deoxy-2'-fluoroadenosine
  modified_base (17)..(17): cm
  modified_base (18)..(18): 2'-deoxy-2'-fluoroadenosine
  modified_base (19)..(19): cm
  modified_base (20)..(20): 2'-deoxy-2'-fluoroadenosine
  modified_base (21)..(21): gm
caaaugcuucaaggaacacag

SEQ ID NO: 6002 - RNA, 21 nt, Artificial Sequence
  siRNA sense strand against b2GPI
  modified_base (1)..(1): 2'-deoxy-2'-fluoroadenosine
  modified_base (2)..(2): 2'-O-methyladenosine
  misc_feature (2)..(3): 5'-phosphonothioate
  modified_base (3)..(3): 2'-deoxy-2'-fluoroadenosine
  modified_base (4)..(4): um
  modified_base (5)..(5): 2'-deoxy-2'-fluoroguanosine
  modified_base (6)..(6): cm
  modified_base (7)..(7): 2'-deoxy-2'-fluorouridine
  modified_base (8)..(8): um
  modified_base (9)..(9): 2'-deoxy-2'-fluorocytidine
  modified_base (10)..(10): 2'-O-methyladenosine
  modified_base (11)..(11): 2'-deoxy-2'-fluoroadenosine
  modified_base (12)..(12): 2'-deoxy-2'-fluoroguanosine
  modified_base (13)..(13): gm
  modified_base (14)..(14): 2'-deoxy-2'-fluoroadenosine
  modified_base (15)..(15): 2'-O-methyladenosine
  modified_base (16)..(16): 2'-deoxy-2'-fluorocytidine
  modified_base (17)..(17): 2'-O-methyladenosine
  modified_base (18)..(18): 2'-deoxy-2'-fluorocytidine
  modified_base (19)..(19): 2'-O-methyladenosine
  modified_base (20)..(20): 2'-deoxy-2'-fluoroguanosine
  modified_base (21)..(21): um
aaaugcuucaaggaacacagu

SEQ ID NO: 6003 - RNA, 21 nt, Artificial Sequence
  siRNA sense strand against b2GPI
  modified_base (1)..(1): 2'-deoxy-2'-fluoroadenosine
  modified_base (2)..(2): 2'-O-methyladenosine
  misc_feature (2)..(3): 5'-phosphonothioate
  modified_base (3)..(3): 2'-deoxy-2'-fluorouridine
  modified_base (4)..(4): gm
  modified_base (5)..(5): 2'-deoxy-2'-fluorocytidine
  modified_base (6)..(6): um
  modified_base (7)..(7): 2'-deoxy-2'-fluorouridine
  modified_base (8)..(8): cm
  modified_base (9)..(9): 2'-deoxy-2'-fluoroadenosine
  modified_base (10)..(10): 2'-O-methyladenosine
  modified_base (11)..(11): 2'-deoxy-2'-fluoroguanosine
  modified_base (12)..(12): 2'-deoxy-2'-fluoroguanosine
  modified_base (13)..(13): 2'-O-methyladenosine
  modified_base (14)..(14): 2'-deoxy-2'-fluoroadenosine
  modified_base (15)..(15): cm
  modified_base (16)..(16): 2'-deoxy-2'-fluoroadenosine
  modified_base (17)..(17): cm
  modified_base (18)..(18): 2'-deoxy-2'-fluoroadenosine
  modified_base (19)..(19): gm
  modified_base (20)..(20): 2'-deoxy-2'-fluorouridine
  modified_base (21)..(21): um
aaugcuucaaggaacacaguu

SEQ ID NO: 6004 - RNA, 21 nt, Artificial Sequence
  siRNA sense strand against b2GPI
  modified_base (1)..(1): 2'-deoxy-2'-fluoroadenosine
  modified_base (2)..(2): um
  misc_feature (2)..(3): 5'-phosphonothioate
  modified_base (3)..(3): 2'-deoxy-2'-fluoroguanosine
  modified_base (4)..(4): cm
  modified_base (5)..(5): 2'-deoxy-2'-fluorouridine
  modified_base (6)..(6): um
  modified_base (7)..(7): 2'-deoxy-2'-fluorocytidine
  modified_base (8)..(8): 2'-O-methyladenosine
  modified_base (9)..(9): 2'-deoxy-2'-fluoroadenosine
  modified_base (10)..(10): gm
  modified_base (11)..(11): 2'-deoxy-2'-fluoroguanosine
  modified_base (12)..(12): 2'-deoxy-2'-fluoroadenosine
  modified_base (13)..(13): 2'-O-methyladenosine
  modified_base (14)..(14): 2'-deoxy-2'-fluorocytidine
  modified_base (15)..(15): 2'-O-methyladenosine
  modified_base (16)..(16): 2'-deoxy-2'-fluorocytidine
  modified_base (17)..(17): 2'-O-methyladenosine
  modified_base (18)..(18): 2'-deoxy-2'-fluoroguanosine
  modified_base (19)..(19): um
  modified_base (20)..(20): 2'-deoxy-2'-fluorouridine
  modified_base (21)..(21): cm
augcuucaaggaacacaguuc

SEQ ID NO: 6005 - RNA, 21 nt, Artificial Sequence
  siRNA sense strand against b2GPI
  modified_base (1)..(1): 2'-deoxy-2'-fluorouridine
  modified_base (2)..(2): gm
  misc_feature (2)..(3): 5'-phosphonothioate
  modified_base (3)..(3): 2'-deoxy-2'-fluorocytidine
  modified_base (4)..(4): um
  modified_base (5)..(5): 2'-deoxy-2'-fluorouridine
  modified_base (6)..(6): cm
  modified_base (7)..(7): 2'-deoxy-2'-fluoroadenosine
  modified_base (8)..(8): 2'-O-methyladenosine
  modified_base (9)..(9): 2'-deoxy-2'-fluoroguanosine
  modified_base (10)..(10): gm
  modified_base (11)..(11): 2'-deoxy-2'-fluoroadenosine
  modified_base (12)..(12): 2'-deoxy-2'-fluoroadenosine
  modified_base (13)..(13): cm
  modified_base (14)..(14): 2'-deoxy-2'-fluoroadenosine
  modified_base (15)..(15): cm
  modified_base (16)..(16): 2'-deoxy-2'-fluoroadenosine
  modified_base (17)..(17): gm
  modified_base (18)..(18): 2'-deoxy-2'-fluorouridine
  modified_base (19)..(19): um
  modified_base (20)..(20): 2'-deoxy-2'-fluorocytidine
  modified_base (21)..(21): um
ugcuucaaggaacacaguucu

SEQ ID NO: 6006 - RNA, 21 nt, Artificial Sequence
  siRNA sense strand against b2GPI
  modified_base (1)..(1): 2'-deoxy-2'-fluorocytidine
  modified_base (2)..(2): um
  misc_feature (2)..(3): 5'-phosphonothioate
  modified_base (3)..(3): 2'-deoxy-2'-fluorouridine
  modified_base (4)..(4): cm
  modified_base (5)..(5): 2'-deoxy-2'-fluoroadenosine
  modified_base (6)..(6): 2'-O-methyladenosine
  modified_base (7)..(7): 2'-deoxy-2'-fluoroguanosine
  modified_base (8)..(8): gm
  modified_base (9)..(9): 2'-deoxy-2'-fluoroadenosine
  modified_base (10)..(10): 2'-O-methyladenosine
  modified_base (11)..(11): 2'-deoxy-2'-fluorocytidine
  modified_base (12)..(12): 2'-deoxy-2'-fluoroadenosine
  modified_base (13)..(13): cm
  modified_base (14)..(14): 2'-deoxy-2'-fluoroadenosine
  modified_base (15)..(15): gm
  modified_base (16)..(16): 2'-deoxy-2'-fluorouridine
  modified_base (17)..(17): um
  modified_base (18)..(18): 2'-deoxy-2'-fluorocytidine
  modified_base (19)..(19): um
  modified_base (20)..(20): 2'-deoxy-2'-fluorocytidine
  modified_base (21)..(21): um
cuucaaggaacacaguucucu

SEQ ID NO: 6007 - RNA, 21 nt, Artificial Sequence
  siRNA sense strand against b2GPI
  modified_base (1)..(1): 2'-deoxy-2'-fluorouridine
  modified_base (2)..(2): um
  misc_feature (2)..(3): 5'-phosphonothioate
  modified_base (3)..(3): 2'-deoxy-2'-fluorocytidine
  modified_base (4)..(4): 2'-O-methyladenosine
  modified_base (5)..(5): 2'-deoxy-2'-fluoroadenosine
  modified_base (6)..(6): gm
  modified_base (7)..(7): 2'-deoxy-2'-fluoroguanosine
  modified_base (8)..(8): 2'-O-methyladenosine
  modified_base (9)..(9): 2'-deoxy-2'-fluoroadenosine
  modified_base (10)..(10): cm
  modified_base (11)..(11): 2'-deoxy-2'-fluoroadenosine
  modified_base (12)..(12): 2'-deoxy-2'-fluorocytidine
  modified_base (13)..(13): 2'-O-methyladenosine
  modified_base (14)..(14): 2'-deoxy-2'-fluoroguanosine
  modified_base (15)..(15): um
  modified_base (16)..(16): 2'-deoxy-2'-fluorouridine
  modified_base (17)..(17): cm
  modified_base (18)..(18): 2'-deoxy-2'-fluorouridine
  modified_base (19)..(19): cm
  modified_base (20)..(20): 2'-deoxy-2'-fluorouridine
  modified_base (21)..(21): gm
uucaaggaacacaguucucug

SEQ ID NO: 6008 - RNA, 21 nt, Artificial Sequence
  siRNA sense strand against b2GPI
  modified_base (1)..(1): 2'-deoxy-2'-fluoroadenosine
  modified_base (2)..(2): 2'-O-methyladenosine
  misc_feature (2)..(3): 5'-phosphonothioate
  modified_base (3)..(3): 2'-deoxy-2'-fluoroguanosine
  modified_base (4)..(4): gm
  modified_base (5)..(5): 2'-deoxy-2'-fluoroadenosine
  modified_base (6)..(6): 2'-O-methyladenosine
  modified_base (7)..(7): 2'-deoxy-2'-fluorocytidine
  modified_base (8)..(8): 2'-O-methyladenosine
  modified_base (9)..(9): 2'-deoxy-2'-fluorocytidine
  modified_base (10)..(10): 2'-O-methyladenosine
  modified_base (11)..(11): 2'-deoxy-2'-fluoroguanosine
  modified_base (12)..(12): 2'-deoxy-2'-fluorouridine
  modified_base (13)..(13): um
  modified_base (14)..(14): 2'-deoxy-2'-fluorocytidine
  modified_base (15)..(15): um
  modified_base (16)..(16): 2'-deoxy-2'-fluorocytidine
  modified_base (17)..(17): um
  modified_base (18)..(18): 2'-deoxy-2'-fluoroguanosine
  modified_base (19)..(19): gm
  modified_base (20)..(20): 2'-deoxy-2'-fluorocytidine
  modified_base (21)..(21): um
aaggaacacaguucucuggcu

SEQ ID NO: 6009 - RNA, 21 nt, Artificial Sequence
  siRNA sense strand against b2GPI
  modified_base (1)..(1): 2'-deoxy-2'-fluoroadenosine
  modified_base (2)..(2): gm
  misc_feature (2)..(3): 5'-phosphonothioate
  modified_base (3)..(3): 2'-deoxy-2'-fluoroguanosine
  modified_base (4)..(4): 2'-O-methyladenosine
  modified_base (5)..(5): 2'-deoxy-2'-fluoroadenosine
  modified_base (6)..(6): cm
  modified_base (7)..(7): 2'-deoxy-2'-fluoroadenosine
  modified_base (8)..(8): cm
  modified_base (9)..(9): 2'-deoxy-2'-fluoroadenosine
  modified_base (10)..(10): gm
  modified_base (11)..(11): 2'-deoxy-2'-fluorouridine
  modified_base (12)..(12): 2'-deoxy-2'-fluorouridine
  modified_base (13)..(13): cm
  modified_base (14)..(14): 2'-deoxy-2'-fluorouridine
  modified_base (15)..(15): cm
  modified_base (16)..(16): 2'-deoxy-2'-fluorouridine
  modified_base (17)..(17): gm
  modified_base (18)..(18): 2'-deoxy-2'-fluoroguanosine
  modified_base (19)..(19): cm
  modified_base (20)..(20): 2'-deoxy-2'-fluorouridine
  modified_base (21)..(21): um
aggaacacaguucucuggcuu

SEQ ID NO: 6010 - RNA, 21 nt, Artificial Sequence
  siRNA sense strand against b2GPI
  modified_base (1)..(1): 2'-deoxy-2'-fluoroguanosine
  modified_base (2)..(2): gm
  misc_feature (2)..(3): 5'-phosphonothioate
  modified_base (3)..(3): 2'-deoxy-2'-fluoroadenosine
  modified_base (4)..(4): 2'-O-methyladenosine
  modified_base (5)..(5): 2'-deoxy-2'-fluorocytidine
  modified_base (6)..(6): 2'-O-methyladenosine
  modified_base (7)..(7): 2'-deoxy-2'-fluorocytidine
  modified_base (8)..(8): 2'-O-methyladenosine
  modified_base (9)..(9): 2'-deoxy-2'-fluoroguanosine
  modified_base (10)..(10): um
  modified_base (11)..(11): 2'-deoxy-2'-fluorouridine
  modified_base (12)..(12): 2'-deoxy-2'-fluorocytidine
  modified_base (13)..(13): um
  modified_base (14)..(14): 2'-deoxy-2'-fluorocytidine
  modified_base (15)..(15): um
  modified_base (16)..(16): 2'-deoxy-2'-fluoroguanosine
  modified_base (17)..(17): gm
  modified_base (18)..(18): 2'-deoxy-2'-fluorocytidine
  modified_base (19)..(19): um
  modified_base (20)..(20): 2'-deoxy-2'-fluorouridine
  modified_base (21)..(21): um
ggaacacaguucucuggcuuu

SEQ ID NO: 6011 - RNA, 21 nt, Artificial Sequence
  siRNA sense strand against b2GPI
  modified_base (1)..(1): 2'-deoxy-2'-fluoroguanosine
  modified_base (2)..(2): 2'-O-methyladenosine
  misc_feature (2)..(3): 5'-phosphonothioate
  modified_base (3)..(3): 2'-deoxy-2'-fluoroadenosine
  modified_base (4)..(4): cm
  modified_base (5)..(5): 2'-deoxy-2'-fluoroadenosine
  modified_base (6)..(6): cm
  modified_base (7)..(7): 2'-deoxy-2'-fluoroadenosine
  modified_base (8)..(8): gm
  modified_base (9)..(9): 2'-deoxy-2'-fluorouridine
  modified_base (10)..(10): um
  modified_base (11)..(11): 2'-deoxy-2'-fluorocytidine
  modified_base (12)..(12): 2'-deoxy-2'-fluorouridine
  modified_base (13)..(13): cm
  modified_base (14)..(14): 2'-deoxy-2'-fluorouridine
  modified_base (15)..(15): gm
  modified_base (16)..(16): 2'-deoxy-2'-fluoroguanosine
  modified_base (17)..(17): cm
  modified_base (18)..(18): 2'-deoxy-2'-fluorouridine
  modified_base (19)..(19): um
  modified_base (20)..(20): 2'-deoxy-2'-fluorouridine
  modified_base (21)..(21): um
gaacacaguucucuggcuuuu

SEQ ID NO: 6012 - RNA, 21 nt, Artificial Sequence
  siRNA sense strand against b2GPI
  modified_base (1)..(1): 2'-deoxy-2'-fluoroadenosine
  modified_base (2)..(2): 2'-O-methyladenosine
  misc_feature (2)..(3): 5'-phosphonothioate
  modified_base (3)..(3): 2'-deoxy-2'-fluorocytidine
  modified_base (4)..(4): 2'-O-methyladenosine
  modified_base (5)..(5): 2'-deoxy-2'-fluorocytidine
  modified_base (6)..(6): 2'-O-methyladenosine
  modified_base (7)..(7): 2'-deoxy-2'-fluoroguanosine
  modified_base (8)..(8): um
  modified_base (9)..(9): 2'-deoxy-2'-fluorouridine
  modified_base (10)..(10): cm
  modified_base (11)..(11): 2'-deoxy-2'-fluorouridine
  modified_base (12)..(12): 2'-deoxy-2'-fluorocytidine
  modified_base (13)..(13): um
  modified_base (14)..(14): 2'-deoxy-2'-fluoroguanosine
  modified_base (15)..(15): gm
  modified_base (16)..(16): 2'-deoxy-2'-fluorocytidine
  modified_base (17)..(17): um
  modified_base (18)..(18): 2'-deoxy-2'-fluorouridine
  modified_base (19)..(19): um
  modified_base (20)..(20): 2'-deoxy-2'-fluorouridine
  modified_base (21)..(21): um
aacacaguucucuggcuuuuu

SEQ ID NO: 6013 - RNA, 21 nt, Artificial Sequence
  siRNA sense strand against b2GPI
  modified_base (1)..(1): 2'-deoxy-2'-fluoroadenosine
  modified_base (2)..(2): cm
  misc_feature (2)..(3): 5'-phosphonothioate
  modified_base (3)..(3): 2'-deoxy-2'-fluoroadenosine
  modified_base (4)..(4): cm
  modified_base (5)..(5): 2'-deoxy-2'-fluoroadenosine
  modified_base (6)..(6): gm
  modified_base (7)..(7): 2'-deoxy-2'-fluorouridine
  modified_base (8)..(8): um
  modified_base (9)..(9): 2'-deoxy-2'-fluorocytidine
  modified_base (10)..(10): um
  modified_base (11)..(11): 2'-deoxy-2'-fluorocytidine
  modified_base (12)..(12): 2'-deoxy-2'-fluorouridine
  modified_base (13)..(13): gm
  modified_base (14)..(14): 2'-deoxy-2'-fluoroguanosine
  modified_base (15)..(15): cm
  modified_base (16)..(16): 2'-deoxy-2'-fluorouridine
  modified_base (17)..(17): um
  modified_base (18)..(18): 2'-deoxy-2'-fluorouridine
  modified_base (19)..(19): um
  modified_base (20)..(20): 2'-deoxy-2'-fluorouridine
  modified_base (21)..(21): gm
acacaguucucuggcuuuuug

SEQ ID NO: 6014 - RNA, 21 nt, Artificial Sequence
  siRNA sense strand against b2GPI
  modified_base (1)..(1): 2'-deoxy-2'-fluorocytidine
  modified_base (2)..(2): 2'-O-methyladenosine
  misc_feature (2)..(3): 5'-phosphonothioate
  modified_base (3)..(3): 2'-deoxy-2'-fluorocytidine
  modified_base (4)..(4): 2'-O-methyladenosine
  modified_base (5)..(5): 2'-deoxy-2'-fluoroguanosine
  modified_base (6)..(6): um
  modified_base (7)..(7): 2'-deoxy-2'-fluorouridine
  modified_base (8)..(8): cm
  modified_base (9)..(9): 2'-deoxy-2'-fluorouridine
  modified_base (10)..(10): cm
  modified_base (11)..(11): 2'-deoxy-2'-fluorouridine
  modified_base (12)..(12): 2'-deoxy-2'-fluoroguanosine
  modified_base (13)..(13): gm
  modified_base (14)..(14): 2'-deoxy-2'-fluorocytidine
  modified_base (15)..(15): um
  modified_base (16)..(16): 2'-deoxy-2'-fluorouridine
  modified_base (17)..(17): um
  modified_base (18)..(18): 2'-deoxy-2'-fluorouridine
  modified_base (19)..(19): um
  modified_base (20)..(20): 2'-deoxy-2'-fluoroguanosine
  modified_base (21)..(21): gm
cacaguucucuggcuuuuugg

SEQ ID NO: 6015 - RNA, 21 nt, Artificial Sequence
  siRNA sense strand against b2GPI
  modified_base (1)..(1): 2'-deoxy-2'-fluoroadenosine
  modified_base (2)..(2): cm
  misc_feature (2)..(3): 5'-phosphonothioate
  modified_base (3)..(3): 2'-deoxy-2'-fluoroadenosine
  modified_base (4)..(4): gm
  modified_base (5)..(5): 2'-deoxy-2'-fluorouridine
  modified_base (6)..(6): um
  modified_base (7)..(7): 2'-deoxy-2'-fluorocytidine
  modified_base (8)..(8): um
  modified_base (9)..(9): 2'-deoxy-2'-fluorocytidine
  modified_base (10)..(10): um
  modified_base (11)..(11): 2'-deoxy-2'-fluoroguanosine
  modified_base (12)..(12): 2'-deoxy-2'-fluoroguanosine
  modified_base (13)..(13): cm
  modified_base (14)..(14): 2'-deoxy-2'-fluorouridine
  modified_base (15)..(15): um
  modified_base (16)..(16): 2'-deoxy-2'-fluorouridine
  modified_base (17)..(17): um
  modified_base (18)..(18): 2'-deoxy-2'-fluorouridine
  modified_base (19)..(19): gm
  modified_base (20)..(20): 2'-deoxy-2'-fluoroguanosine
  modified_base (21)..(21): 2'-O-methyladenosine
acaguucucuggcuuuuugga

SEQ ID NO: 6016 - RNA, 21 nt, Artificial Sequence
  siRNA sense strand against b2GPI
  modified_base (1)..(1): 2'-deoxy-2'-fluorocytidine
  modified_base (2)..(2): 2'-O-methyladenosine
  misc_feature (2)..(3): 5'-phosphonothioate
  modified_base (3)..(3): 2'-deoxy-2'-fluoroguanosine
  modified_base (4)..(4): um
  modified_base (5)..(5): 2'-deoxy-2'-fluorouridine
  modified_base (6)..(6): cm
  modified_base (7)..(7): 2'-deoxy-2'-fluorouridine
  modified_base (8)..(8): cm
  modified_base (9)..(9): 2'-deoxy-2'-fluorouridine
  modified_base (10)..(10): gm
  modified_base (11)..(11): 2'-deoxy-2'-fluoroguanosine
  modified_base (12)..(12): 2'-deoxy-2'-fluorocytidine
  modified_base (13)..(13): um
  modified_base (14)..(14): 2'-deoxy-2'-fluorouridine
  modified_base (15)..(15): um
  modified_base (16)..(16): 2'-deoxy-2'-fluorouridine
  modified_base (17)..(17): um
  modified_base (18)..(18): 2'-deoxy-2'-fluoroguanosine
  modified_base (19)..(19): gm
  modified_base (20)..(20): 2'-deoxy-2'-fluoroadenosine
  modified_base (21)..(21): 2'-O-methyladenosine
caguucucuggcuuuuuggaa

SEQ ID NO: 6017 - RNA, 21 nt, Artificial Sequence
  siRNA sense strand against b2GPI
  modified_base (1)..(1): 2'-deoxy-2'-fluoroadenosine
  modified_base (2)..(2): gm
  misc_feature (2)..(3): 5'-phosphonothioate
  modified_base (3)..(3): 2'-deoxy-2'-fluorouridine
  modified_base (4)..(4): um
  modified_base (5)..(5): 2'-deoxy-2'-fluorocytidine
  modified_base (6)..(6): um
  modified_base (7)..(7): 2'-deoxy-2'-fluorocytidine
  modified_base (8)..(8): um
  modified_base (9)..(9): 2'-deoxy-2'-fluoroguanosine
  modified_base (10)..(10): gm
  modified_base (11)..(11): 2'-deoxy-2'-fluorocytidine
  modified_base (12)..(12): 2'-deoxy-2'-fluorouridine
  modified_base (13)..(13): um
  modified_base (14)..(14): 2'-deoxy-2'-fluorouridine
  modified_base (15)..(15): um
  modified_base (16)..(16): 2'-deoxy-2'-fluorouridine
  modified_base (17)..(17): gm
  modified_base (18)..(18): 2'-deoxy-2'-fluoroguanosine
  modified_base (19)..(19): 2'-O-methyladenosine
  modified_base (20)..(20): 2'-deoxy-2'-fluoroadenosine
  modified_base (21)..(21): 2'-O-methyladenosine
aguucucuggcuuuuuggaaa

SEQ ID NO: 6018 - RNA, 21 nt, Artificial Sequence
  siRNA sense strand against b2GPI
  modified_base (1)..(1): 2'-deoxy-2'-fluoroguanosine
  modified_base (2)..(2): um
  misc_feature (2)..(3): 5'-phosphonothioate
  modified_base (3)..(3): 2'-deoxy-2'-fluorouridine
  modified_base (4)..(4): cm
  modified_base (5)..(5): 2'-deoxy-2'-fluorouridine
  modified_base (6)..(6): cm
  modified_base (7)..(7): 2'-deoxy-2'-fluorouridine
  modified_base (8)..(8): gm
  modified_base (9)..(9): 2'-deoxy-2'-fluoroguanosine
  modified_base (10)..(10): cm
  modified_base (11)..(11): 2'-deoxy-2'-fluorouridine
  modified_base (12)..(12): 2'-deoxy-2'-fluorouridine
  modified_base (13)..(13): um
  modified_base (14)..(14): 2'-deoxy-2'-fluorouridine
  modified_base (15)..(15): um
  modified_base (16)..(16): 2'-deoxy-2'-fluoroguanosine
  modified_base (17)..(17): gm
  modified_base (18)..(18): 2'-deoxy-2'-fluoroadenosine
  modified_base (19)..(19): 2'-O-methyladenosine
  modified_base (20)..(20): 2'-deoxy-2'-fluoroadenosine
  modified_base (21)..(21): 2'-O-methyladenosine
guucucuggcuuuuuggaaaa

SEQ ID NO: 6019 - RNA, 21 nt, Artificial Sequence
  siRNA sense strand against b2GPI
  modified_base (1)..(1): 2'-deoxy-2'-fluorocytidine
  modified_base (2)..(2): um
  misc_feature (2)..(3): 5'-phosphonothioate
  modified_base (3)..(3): 2'-deoxy-2'-fluorocytidine
  modified_base (4)..(4): um
  modified_base (5)..(5): 2'-deoxy-2'-fluoroguanosine
  modified_base (6)..(6): gm
  modified_base (7)..(7): 2'-deoxy-2'-fluorocytidine
  modified_base (8)..(8): um
  modified_base (9)..(9): 2'-deoxy-2'-fluorouridine
  modified_base (10)..(10): um
  modified_base (11)..(11): 2'-deoxy-2'-fluorouridine
  modified_base (12)..(12): 2'-deoxy-2'-fluorouridine
  modified_base (13)..(13): gm
  modified_base (14)..(14): 2'-deoxy-2'-fluoroguanosine
  modified_base (15)..(15): 2'-O-methyladenosine
  modified_base (16)..(16): 2'-deoxy-2'-fluoroadenosine
  modified_base (17)..(17): 2'-O-methyladenosine
  modified_base (18)..(18): 2'-deoxy-2'-fluoroadenosine
  modified_base (19)..(19): cm
  modified_base (20)..(20): 2'-deoxy-2'-fluorouridine
  modified_base (21)..(21): gm
cucuggcuuuuuggaaaacug

SEQ ID NO: 6020 - RNA, 21 nt, Artificial Sequence
  siRNA sense strand against b2GPI
  modified_base (1)..(1): 2'-deoxy-2'-fluorouridine
  modified_base (2)..(2): cm
  misc_feature (2)..(3): 5'-phosphonothioate
  modified_base (3)..(3): 2'-deoxy-2'-fluorouridine
  modified_base (4)..(4): gm
  modified_base (5)..(5): 2'-deoxy-2'-fluoroguanosine
  modified_base (6)..(6): cm
  modified_base (7)..(7): 2'-deoxy-2'-fluorouridine
  modified_base (8)..(8): um
  modified_base (9)..(9): 2'-deoxy-2'-fluorouridine
  modified_base (10)..(10): um
  modified_base (11)..(11): 2'-deoxy-2'-fluorouridine
  modified_base (12)..(12): 2'-deoxy-2'-fluoroguanosine
  modified_base (13)..(13): gm
  modified_base (14)..(14): 2'-deoxy-2'-fluoroadenosine
  modified_base (15)..(15): 2'-O-methyladenosine
  modified_base (16)..(16): 2'-deoxy-2'-fluoroadenosine
  modified_base (17)..(17): 2'-O-methyladenosine
  modified_base (18)..(18): 2'-deoxy-2'-fluorocytidine
  modified_base (19)..(19): um
  modified_base (20)..(20): 2'-deoxy-2'-fluoroguanosine
  modified_base (21)..(21): 2'-O-methyladenosine
ucuggcuuuuuggaaaacuga

SEQ ID NO: 6021 - RNA, 21 nt, Artificial Sequence
  siRNA sense strand against b2GPI
  modified_base (1)..(1): 2'-deoxy-2'-fluorocytidine
  modified_base (2)..(2): um
  misc_feature (2)..(3): 5'-phosphonothioate
  modified_base (3)..(3): 2'-deoxy-2'-fluoroguanosine
  modified_base (4)..(4): gm
  modified_base (5)..(5): 2'-deoxy-2'-fluorocytidine
  modified_base (6)..(6): um
  modified_base (7)..(7): 2'-deoxy-2'-fluorouridine
  modified_base (8)..(8): um
  modified_base (9)..(9): 2'-deoxy-2'-fluorouridine
  modified_base (10)..(10): um
  modified_base (11)..(11): 2'-deoxy-2'-fluoroguanosine
  modified_base (12)..(12): 2'-deoxy-2'-fluoroguanosine
  modified_base (13)..(13): 2'-O-methyladenosine
  modified_base (14)..(14): 2'-deoxy-2'-fluoroadenosine
  modified_base (15)..(15): 2'-O-methyladenosine
  modified_base (16)..(16): 2'-deoxy-2'-fluoroadenosine
  modified_base (17)..(17): cm
  modified_base (18)..(18): 2'-deoxy-2'-fluorouridine
  modified_base (19)..(19): gm
  modified_base (20)..(20): 2'-deoxy-2'-fluoroadenosine
  modified_base (21)..(21): um
cuggcuuuuuggaaaacugau

SEQ ID NO: 6022 - RNA, 21 nt, Artificial Sequence
  siRNA sense strand against b2GPI
  modified_base (1)..(1): 2'-deoxy-2'-fluorouridine
  modified_base (2)..(2): gm
  misc_feature (2)..(3): 5'-phosphonothioate
  modified_base (3)..(3): 2'-deoxy-2'-fluoroguanosine
  modified_base (4)..(4): cm
  modified_base (5)..(5): 2'-deoxy-2'-fluorouridine
  modified_base (6)..(6): um
  modified_base (7)..(7): 2'-deoxy-2'-fluorouridine
  modified_base (8)..(8): um
  modified_base (9)..(9): 2'-deoxy-2'-fluorouridine
  modified_base (10)..(10): gm
  modified_base (11)..(11): 2'-deoxy-2'-fluoroguanosine
  modified_base (12)..(12): 2'-deoxy-2'-fluoroadenosine
  modified_base (13)..(13): 2'-O-methyladenosine
  modified_base (14)..(14): 2'-deoxy-2'-fluoroadenosine
  modified_base (15)..(15): 2'-O-methyladenosine
  modified_base (16)..(16): 2'-deoxy-2'-fluorocytidine
  modified_base (17)..(17): um
  modified_base (18)..(18): 2'-deoxy-2'-fluoroguanosine
  modified_base (19)..(19): 2'-O-methyladenosine
  modified_base (20)..(20): 2'-deoxy-2'-fluorouridine
  modified_base (21)..(21): gm
uggcuuuuuggaaaacugaug

SEQ ID NO: 6023 - RNA, 21 nt, Artificial Sequence
  siRNA sense strand against b2GPI
  modified_base (1)..(1): 2'-deoxy-2'-fluoroguanosine
  modified_base (2)..(2): cm
  misc_feature (2)..(3): 5'-phosphonothioate
  modified_base (3)..(3): 2'-deoxy-2'-fluorouridine
  modified_base (4)..(4): um
  modified_base (5)..(5): 2'-deoxy-2'-fluorouridine
  modified_base (6)..(6): um
  modified_base (7)..(7): 2'-deoxy-2'-fluorouridine
  modified_base (8)..(8): gm
  modified_base (9)..(9): 2'-deoxy-2'-fluoroguanosine
  modified_base (10)..(10): 2'-O-methyladenosine
  modified_base (11)..(11): 2'-deoxy-2'-fluoroadenosine
  modified_base (12)..(12): 2'-deoxy-2'-fluoroadenosine
  modified_base (13)..(13): 2'-O-methyladenosine
  modified_base (14)..(14): 2'-deoxy-2'-fluorocytidine
  modified_base (15)..(15): um
  modified_base (16)..(16): 2'-deoxy-2'-fluoroguanosine
  modified_base (17)..(17): 2'-O-methyladenosine
  modified_base (18)..(18): 2'-deoxy-2'-fluorouridine
  modified_base (19)..(19): gm
  modified_base (20)..(20): 2'-deoxy-2'-fluorocytidine
  modified_base (21)..(21): 2'-O-methyladenosine
gcuuuuuggaaaacugaugca

SEQ ID NO: 6024 - RNA, 21 nt, Artificial Sequence
  siRNA sense strand against b2GPI
  modified_base (1)..(1): 2'-deoxy-2'-fluorocytidine
  modified_base (2)..(2): um
  misc_feature (2)..(3): 5'-phosphonothioate
  modified_base (3)..(3): 2'-deoxy-2'-fluorouridine
  modified_base (4)..(4): um
  modified_base (5)..(5): 2'-deoxy-2'-fluorouridine
  modified_base (6)..(6): um
  modified_base (7)..(7): 2'-deoxy-2'-fluoroguanosine
  modified_base (8)..(8): gm
  modified_base (9)..(9): 2'-deoxy-2'-fluoroadenosine
  modified_base (10)..(10): 2'-O-methyladenosine
  modified_base (11)..(11): 2'-deoxy-2'-fluoroadenosine
  modified_base (12)..(12): 2'-deoxy-2'-fluoroadenosine
  modified_base (13)..(13): cm
  modified_base (14)..(14): 2'-deoxy-2'-fluorouridine
  modified_base (15)..(15): gm
  modified_base (16)..(16): 2'-deoxy-2'-fluoroadenosine
  modified_base (17)..(17): um
  modified_base (18)..(18): 2'-deoxy-2'-fluoroguanosine
  modified_base (19)..(19): cm
  modified_base (20)..(20): 2'-deoxy-2'-fluoroadenosine
  modified_base (21)..(21): um
cuuuuuggaaaacugaugcau

SEQ ID NO: 6025 - RNA, 21 nt, Artificial Sequence
  siRNA sense strand against b2GPI
  modified_base (1)..(1): 2'-deoxy-2'-fluorouridine
  modified_base (2)..(2): um
  misc_feature (2)..(3): 5'-phosphonothioate
  modified_base (3)..(3): 2'-deoxy-2'-fluoroguanosine
  modified_base (4)..(4): gm
  modified_base (5)..(5): 2'-deoxy-2'-fluoroadenosine
  modified_base (6)..(6): 2'-O-methyladenosine
  modified_base (7)..(7): 2'-deoxy-2'-fluoroadenosine
  modified_base (8)..(8): 2'-O-methyladenosine
  modified_base (9)..(9): 2'-deoxy-2'-fluorocytidine
  modified_base (10)..(10): um
  modified_base (11)..(11): 2'-deoxy-2'-fluoroguanosine
  modified_base (12)..(12): 2'-deoxy-2'-fluoroadenosine
  modified_base (13)..(13): um
  modified_base (14)..(14): 2'-deoxy-2'-fluoroguanosine
  modified_base (15)..(15): cm
  modified_base (16)..(16): 2'-deoxy-2'-fluoroadenosine
  modified_base (17)..(17): um
  modified_base (18)..(18): 2'-deoxy-2'-fluorocytidine
  modified_base (19)..(19): cm
  modified_base (20)..(20): 2'-deoxy-2'-fluoroguanosine
  modified_base (21)..(21): 2'-O-methyladenosine
uuggaaaacugaugcauccga

SEQ ID NO: 6026 - RNA, 21 nt, Artificial Sequence
  siRNA sense strand against b2GPI
  modified_base (1)..(1): 2'-deoxy-2'-fluorouridine
  modified_base (2)..(2): gm
  misc_feature (2)..(3): 5'-phosphonothioate
  modified_base (3)..(3): 2'-deoxy-2'-fluoroguanosine
  modified_base (4)..(4): 2'-O-methyladenosine
  modified_base (5)..(5): 2'-deoxy-2'-fluoroadenosine
  modified_base (6)..(6): 2'-O-methyladenosine
  modified_base (7)..(7): 2'-deoxy-2'-fluoroadenosine
  modified_base (8)..(8): cm
  modified_base (9)..(9): 2'-deoxy-2'-fluorouridine
  modified_base (10)..(10): gm
  modified_base (11)..(11): 2'-deoxy-2'-fluoroadenosine
  modified_base (12)..(12): 2'-deoxy-2'-fluorouridine
  modified_base (13)..(13): gm
  modified_base (14)..(14): 2'-deoxy-2'-fluorocytidine
  modified_base (15)..(15): 2'-O-methyladenosine
  modified_base (16)..(16): 2'-deoxy-2'-fluorouridine
  modified_base (17)..(17): cm
  modified_base (18)..(18): 2'-deoxy-2'-fluorocytidine
  modified_base (19)..(19): gm
  modified_base (20)..(20): 2'-deoxy-2'-fluoroadenosine
  modified_base (21)..(21): um
uggaaaacugaugcauccgau

SEQ ID NO: 6027 - RNA, 21 nt, Artificial Sequence
  siRNA sense strand against b2GPI
  modified_base (1)..(1): 2'-deoxy-2'-fluoroguanosine
  modified_base (2)..(2): gm
  misc_feature (2)..(3): 5'-phosphonothioate
  modified_base (3)..(3): 2'-deoxy-2'-fluoroadenosine
  modified_base (4)..(4): 2'-O-methyladenosine
  modified_base (5)..(5): 2'-deoxy-2'-fluoroadenosine
  modified_base (6)..(6): 2'-O-methyladenosine
  modified_base (7)..(7): 2'-deoxy-2'-fluorocytidine
  modified_base (8)..(8): um
  modified_base (9)..(9): 2'-deoxy-2'-fluoroguanosine
  modified_base (10)..(10): 2'-O-methyladenosine
  modified_base (11)..(11): 2'-deoxy-2'-fluorouridine
  modified_base (12)..(12): 2'-deoxy-2'-fluoroguanosine
  modified_base (13)..(13): cm
  modified_base (14)..(14): 2'-deoxy-2'-fluoroadenosine
  modified_base (15)..(15): um
  modified_base (16)..(16): 2'-deoxy-2'-fluorocytidine
  modified_base (17)..(17): cm
  modified_base (18)..(18): 2'-deoxy-2'-fluoroguanosine
  modified_base (19)..(19): 2'-O-methyladenosine
  modified_base (20)..(20): 2'-deoxy-2'-fluorouridine
  modified_base (21)..(21): gm
ggaaaacugaugcauccgaug

SEQ ID NO: 6028 - RNA, 21 nt, Artificial Sequence
  siRNA sense strand against b2GPI
  modified_base (1)..(1): 2'-deoxy-2'-fluoroguanosine
  modified_base (2)..(2): 2'-O-methyladenosine
  misc_feature (2)..(3): 5'-phosphonothioate
  modified_base (3)..(3): 2'-deoxy-2'-fluoroadenosine
  modified_base (4)..(4): 2'-O-methyladenosine
  modified_base (5)..(5): 2'-deoxy-2'-fluoroadenosine
  modified_base (6)..(6): cm
  modified_base (7)..(7): 2'-deoxy-2'-fluorouridine
  modified_base (8)..(8): gm
  modified_base (9)..(9): 2'-deoxy-2'-fluoroadenosine
  modified_base (10)..(10): um
  modified_base (11)..(11): 2'-deoxy-2'-fluoroguanosine
  modified_base (12)..(12): 2'-deoxy-2'-fluorocytidine
  modified_base (13)..(13): 2'-O-methyladenosine
  modified_base (14)..(14): 2'-deoxy-2'-fluorouridine
  modified_base (15)..(15): cm
  modified_base (16)..(16): 2'-deoxy-2'-fluorocytidine
  modified_base (17)..(17): gm
  modified_base (18)..(18): 2'-deoxy-2'-fluoroadenosine
  modified_base (19)..(19): um
  modified_base (20)..(20): 2'-deoxy-2'-fluoroguanosine
  modified_base (21)..(21): um
gaaaacugaugcauccgaugu

SEQ ID NO: 6029 - RNA, 21 nt, Artificial Sequence
  siRNA sense strand against b2GPI
  modified_base (1)..(1): 2'-deoxy-2'-fluoroadenosine
  modified_base (2)..(2): 2'-O-methyladenosine
  misc_feature (2)..(3): 5'-phosphonothioate
  modified_base (3)..(3): 2'-deoxy-2'-fluoroadenosine
  modified_base (4)..(4): 2'-O-methyladenosine
  modified_base (5)..(5): 2'-deoxy-2'-fluorocytidine
  modified_base (6)..(6): um
  modified_base (7)..(7): 2'-deoxy-2'-fluoroguanosine
  modified_base (8)..(8): 2'-O-methyladenosine
  modified_base (9)..(9): 2'-deoxy-2'-fluorouridine
  modified_base (10)..(10): gm
  modified_base (11)..(11): 2'-deoxy-2'-fluorocytidine
  modified_base (12)..(12): 2'-deoxy-2'-fluoroadenosine
  modified_base (13)..(13): um
  modified_base (14)..(14): 2'-deoxy-2'-fluorocytidine
  modified_base (15)..(15): cm
  modified_base (16)..(16): 2'-deoxy-2'-fluoroguanosine
  modified_base (17)..(17): 2'-O-methyladenosine
  modified_base (18)..(18): 2'-deoxy-2'-fluorouridine
  modified_base (19)..(19): gm
  modified_base (20)..(20): 2'-deoxy-2'-fluorouridine
  modified_base (21)..(21): 2'-O-methyladenosine
aaaacugaugcauccgaugua

SEQ ID NO: 6030 - RNA, 21 nt, Artificial Sequence
  siRNA sense strand against b2GPI
  modified_base (1)..(1): 2'-deoxy-2'-fluoroadenosine
  modified_base (2)..(2): 2'-O-methyladenosine
  misc_feature (2)..(3): 5'-phosphonothioate
  modified_base (3)..(3): 2'-deoxy-2'-fluorocytidine
  modified_base (4)..(4): um
  modified_base (5)..(5): 2'-deoxy-2'-fluoroguanosine
  modified_base (6)..(6): 2'-O-methyladenosine
  modified_base (7)..(7): 2'-deoxy-2'-fluorouridine
  modified_base (8)..(8): gm
  modified_base (9)..(9): 2'-deoxy-2'-fluorocytidine
  modified_base (10)..(10): 2'-O-methyladenosine
  modified_base (11)..(11): 2'-deoxy-2'-fluorouridine
  modified_base (12)..(12): 2'-deoxy-2'-fluorocytidine
  modified_base (13)..(13): cm
  modified_base (14)..(14): 2'-deoxy-2'-fluoroguanosine
  modified_base (15)..(15): 2'-O-methyladenosine
  modified_base (16)..(16): 2'-deoxy-2'-fluorouridine
  modified_base (17)..(17): gm
  modified_base (18)..(18): 2'-deoxy-2'-fluorouridine
  modified_base (19)..(19): 2'-O-methyladenosine
  modified_base (20)..(20): 2'-deoxy-2'-fluoroadenosine
  modified_base (21)..(21): 2'-O-methyladenosine
aacugaugcauccgauguaaa

SEQ ID NO: 6031 - RNA, 21 nt, Artificial Sequence
  siRNA sense strand against b2GPI
  modified_base (1)..(1): 2'-deoxy-2'-fluoroadenosine
  modified_base (2)..(2): cm
  misc_feature (2)..(3): 5'-phosphonothioate
  modified_base (3)..(3): 2'-deoxy-2'-fluorouridine
  modified_base (4)..(4): gm
  modified_base (5)..(5): 2'-deoxy-2'-fluoroadenosine
  modified_base (6)..(6): um
  modified_base (7)..(7): 2'-deoxy-2'-fluoroguanosine
  modified_base (8)..(8): cm
  modified_base (9)..(9): 2'-deoxy-2'-fluoroadenosine
  modified_base (10)..(10): um
  modified_base (11)..(11): 2'-deoxy-2'-fluorocytidine
  modified_base (12)..(12): 2'-deoxy-2'-fluorocytidine
  modified_base (13)..(13): gm
  modified_base (14)..(14): 2'-deoxy-2'-fluoroadenosine
  modified_base (15)..(15): um
  modified_base (16)..(16): 2'-deoxy-2'-fluoroguanosine
  modified_base (17)..(17): um
  modified_base (18)..(18): 2'-deoxy-2'-fluoroadenosine
  modified_base (19)..(19): 2'-O-methyladenosine
  modified_base (20)..(20): 2'-deoxy-2'-fluoroadenosine
  modified_base (21)..(21): gm
acugaugcauccgauguaaag

SEQ ID NO: 6032 - RNA, 21 nt, Artificial Sequence
  siRNA sense strand against b2GPI
  modified_base (1)..(1): 2'-deoxy-2'-fluoroadenosine
  modified_base (2)..(2): um
  misc_feature (2)..(3): 5'-phosphonothioate
  modified_base (3)..(3): 2'-deoxy-2'-fluoroguanosine
  modified_base (4)..(4): cm
  modified_base (5)..(5): 2'-deoxy-2'-fluoroadenosine
  modified_base (6)..(6): um
  modified_base (7)..(7): 2'-deoxy-2'-fluorocytidine
  modified_base (8)..(8): cm
  modified_base (9)..(9): 2'-deoxy-2'-fluoroguanosine
  modified_base (10)..(10): 2'-O-methyladenosine
  modified_base (11)..(11): 2'-deoxy-2'-fluorouridine
  modified_base (12)..(12): 2'-deoxy-2'-fluoroguanosine
  modified_base (13)..(13): um
  modified_base (14)..(14): 2'-deoxy-2'-fluoroadenosine
  modified_base (15)..(15): 2'-O-methyladenosine
  modified_base (16)..(16): 2'-deoxy-2'-fluoroadenosine
  modified_base (17)..(17): gm
  modified_base (18)..(18): 2'-deoxy-2'-fluorocytidine
  modified_base (19)..(19): cm
  modified_base (20)..(20): 2'-deoxy-2'-fluoroadenosine
  modified_base (21)..(21): um
augcauccgauguaaagccau

SEQ ID NO: 6033 - RNA, 21 nt, Artificial Sequence
  siRNA sense strand against b2GPI
  modified_base (1)..(1): 2'-deoxy-2'-fluorouridine
  modified_base (2)..(2): gm
  misc_feature (2)..(3): 5'-phosphonothioate
  modified_base (3)..(3): 2'-deoxy-2'-fluorocytidine
  modified_base (4)..(4): 2'-O-methyladenosine
  modified_base (5)..(5): 2'-deoxy-2'-fluorouridine
  modified_base (6)..(6): cm
  modified_base (7)..(7): 2'-deoxy-2'-fluorocytidine
  modified_base (8)..(8): gm
  modified_base (9)..(9): 2'-deoxy-2'-fluoroadenosine
  modified_base (10)..(10): um
  modified_base (11)..(11): 2'-deoxy-2'-fluoroguanosine
  modified_base (12)..(12): 2'-deoxy-2'-fluorouridine
  modified_base (13)..(13): 2'-O-methyladenosine
  modified_base (14)..(14): 2'-deoxy-2'-fluoroadenosine
  modified_base (15)..(15): 2'-O-methyladenosine
  modified_base (16)..(16): 2'-deoxy-2'-fluoroguanosine
  modified_base (17)..(17): cm
  modified_base (18)..(18): 2'-deoxy-2'-fluorocytidine
  modified_base (19)..(19): 2'-O-methyladenosine
  modified_base (20)..(20): 2'-deoxy-2'-fluorouridine
  modified_base (21)..(21): gm
ugcauccgauguaaagccaug

SEQ ID NO: 6034 - RNA, 21 nt, Artificial Sequence
  siRNA sense strand against b2GPI
  modified_base (1)..(1): 2'-deoxy-2'-fluoroadenosine
  modified_base (2)..(2): um
  misc_feature (2)..(3): 5'-phosphonothioate
  modified_base (3)..(3): 2'-deoxy-2'-fluorocytidine
  modified_base (4)..(4): cm
  modified_base (5)..(5): 2'-deoxy-2'-fluoroguanosine
  modified_base (6)..(6): 2'-O-methyladenosine
  modified_base (7)..(7): 2'-deoxy-2'-fluorouridine
  modified_base (8)..(8): gm
  modified_base (9)..(9): 2'-deoxy-2'-fluorouridine
  modified_base (10)..(10): 2'-O-methyladenosine
  modified_base (11)..(11): 2'-deoxy-2'-fluoroadenosine
  modified_base (12)..(12): 2'-deoxy-2'-fluoroadenosine
  modified_base (13)..(13): gm
  modified_base (14)..(14): 2'-deoxy-2'-fluorocytidine
  modified_base (15)..(15): cm
  modified_base (16)..(16): 2'-deoxy-2'-fluoroadenosine
  modified_base (17)..(17): um
  modified_base (18)..(18): 2'-deoxy-2'-fluoroguanosine
  modified_base (19)..(19): cm
  modified_base (20)..(20): 2'-deoxy-2'-fluorouridine
  modified_base (21)..(21): 2'-O-methyladenosine
auccgauguaaagccaugcua

SEQ ID NO: 6035 - RNA, 21 nt, Artificial Sequence
  siRNA sense strand against b2GPI
  modified_base (1)..(1): 2'-deoxy-2'-fluorouridine
  modified_base (2)..(2): cm
  misc_feature (2)..(3): 5'-phosphonothioate
  modified_base (3)..(3): 2'-deoxy-2'-fluorocytidine
  modified_base (4)..(4): gm
  modified_base (5)..(5): 2'-deoxy-2'-fluoroadenosine
  modified_base (6)..(6): um
  modified_base (7)..(7): 2'-deoxy-2'-fluoroguanosine
  modified_base (8)..(8): um
  modified_base (9)..(9): 2'-deoxy-2'-fluoroadenosine
  modified_base (10)..(10): 2'-O-methyladenosine
  modified_base (11)..(11): 2'-deoxy-2'-fluoroadenosine
  modified_base (12)..(12): 2'-deoxy-2'-fluoroguanosine
  modified_base (13)..(13): cm
  modified_base (14)..(14): 2'-deoxy-2'-fluorocytidine
  modified_base (15)..(15): 2'-O-methyladenosine
  modified_base (16)..(16): 2'-deoxy-2'-fluorouridine
  modified_base (17)..(17): gm
  modified_base (18)..(18): 2'-deoxy-2'-fluorocytidine
  modified_base (19)..(19): um
  modified_base (20)..(20): 2'-deoxy-2'-fluoroadenosine
  modified_base (21)..(21): 2'-O-methyladenosine
uccgauguaaagccaugcuaa

SEQ ID NO: 6036 - RNA, 21 nt, Artificial Sequence
  siRNA sense strand against b2GPI
  modified_base (1)..(1): 2'-deoxy-2'-fluorocytidine
  modified_base (2)..(2): cm
  misc_feature (2)..(3): 5'-phosphonothioate
  modified_base (3)..(3): 2'-deoxy-2'-fluoroguanosine
  modified_base (4)..(4): 2'-O-methyladenosine
  modified_base (5)..(5): 2'-deoxy-2'-fluorouridine
  modified_base (6)..(6): gm
  modified_base (7)..(7): 2'-deoxy-2'-fluorouridine
  modified_base (8)..(8): 2'-O-methyladenosine
  modified_base (9)..(9): 2'-deoxy-2'-fluoroadenosine
  modified_base (10)..(10): 2'-O-methyladenosine
  modified_base (11)..(11): 2'-deoxy-2'-fluoroguanosine
  modified_base (12)..(12): 2'-deoxy-2'-fluorocytidine
  modified_base (13)..(13): cm
  modified_base (14)..(14): 2'-deoxy-2'-fluoroadenosine
  modified_base (15)..(15): um
  modified_base (16)..(16): 2'-deoxy-2'-fluoroguanosine
  modified_base (17)..(17): cm
  modified_base (18)..(18): 2'-deoxy-2'-fluorouridine
  modified_base (19)..(19): 2'-O-methyladenosine
  modified_base (20)..(20): 2'-deoxy-2'-fluoroadenosine
  modified_base (21)..(21): gm
ccgauguaaagccaugcuaag

SEQ ID NO: 6037 - RNA, 21 nt, Artificial Sequence
  siRNA sense strand against b2GPI
  modified_base (1)..(1): 2'-deoxy-2'-fluoroguanosine
  modified_base (2)..(2): um
  misc_feature (2)..(3): 5'-phosphonothioate
  modified_base (3)..(3): 2'-deoxy-2'-fluoroadenosine
  modified_base (4)..(4): 2'-O-methyladenosine
  modified_base (5)..(5): 2'-deoxy-2'-fluoroadenosine
  modified_base (6)..(6): gm
  modified_base (7)..(7): 2'-deoxy-2'-fluorocytidine
  modified_base (8)..(8): cm
  modified_base (9)..(9): 2'-deoxy-2'-fluoroadenosine
  modified_base (10)..(10): um
  modified_base (11)..(11): 2'-deoxy-2'-fluoroguanosine
  modified_base (12)..(12): 2'-deoxy-2'-fluorocytidine
  modified_base (13)..(13): um
  modified_base (14)..(14): 2'-deoxy-2'-fluoroadenosine
  modified_base (15)..(15): 2'-O-methyladenosine
  modified_base (16)..(16): 2'-deoxy-2'-fluoroguanosine
  modified_base (17)..(17): gm
  modified_base (18)..(18): 2'-deoxy-2'-fluorouridine
  modified_base (19)..(19): gm
  modified_base (20)..(20): 2'-deoxy-2'-fluoroguanosine
  modified_base (21)..(21): um
guaaagccaugcuaagguggu

SEQ ID NO: 6038 - RNA, 21 nt, Artificial Sequence
  siRNA sense strand against b2GPI
  modified_base (1)..(1): 2'-deoxy-2'-fluorouridine
  modified_base (2)..(2): 2'-O-methyladenosine
  misc_feature (2)..(3): 5'-phosphonothioate
  modified_base (3)..(3): 2'-deoxy-2'-fluoroadenosine
  modified_base (4)..(4): 2'-O-methyladenosine
  modified_base (5)..(5): 2'-deoxy-2'-fluoroguanosine
  modified_base (6)..(6): cm
  modified_base (7)..(7): 2'-deoxy-2'-fluorocytidine
  modified_base (8)..(8): 2'-O-methyladenosine
  modified_base (9)..(9): 2'-deoxy-2'-fluorouridine
  modified_base (10)..(10): gm
  modified_base (11)..(11): 2'-deoxy-2'-fluorocytidine
  modified_base (12)..(12): 2'-deoxy-2'-fluorouridine
  modified_base (13)..(13): 2'-O-methyladenosine
  modified_base (14)..(14): 2'-deoxy-2'-fluoroadenosine
  modified_base (15)..(15): gm
  modified_base (16)..(16): 2'-deoxy-2'-fluoroguanosine
  modified_base (17)..(17): um
  modified_base (18)..(18): 2'-deoxy-2'-fluoroguanosine
  modified_base (19)..(19): gm
  modified_base (20)..(20): 2'-deoxy-2'-fluorouridine
  modified_base (21)..(21): um
uaaagccaugcuaaggugguu

SEQ ID NO: 6039 - RNA, 21 nt, Artificial Sequence
  siRNA sense strand against b2GPI
  modified_base (1)..(1): 2'-deoxy-2'-fluoroadenosine
  modified_base (2)..(2): 2'-O-methyladenosine
  misc_feature (2)..(3): 5'-phosphonothioate
  modified_base (3)..(3): 2'-deoxy-2'-fluoroadenosine
  modified_base (4)..(4): gm
  modified_base (5)..(5): 2'-deoxy-2'-fluorocytidine
  modified_base (6)..(6): cm
  modified_base (7)..(7): 2'-deoxy-2'-fluoroadenosine
  modified_base (8)..(8): um
  modified_base (9)..(9): 2'-deoxy-2'-fluoroguanosine
  modified_base (10)..(10): cm
  modified_base (11)..(11): 2'-deoxy-2'-fluorouridine
  modified_base (12)..(12): 2'-deoxy-2'-fluoroadenosine
  modified_base (13)..(13): 2'-O-methyladenosine
  modified_base (14)..(14): 2'-deoxy-2'-fluoroguanosine
  modified_base (15)..(15): gm
  modified_base (16)..(16): 2'-deoxy-2'-fluorouridine
  modified_base (17)..(17): gm
  modified_base (18)..(18): 2'-deoxy-2'-fluoroguanosine
  modified_base (19)..(19): um
  modified_base (20)..(20): 2'-deoxy-2'-fluorouridine
  modified_base (21)..(21): um
aaagccaugcuaaggugguuu

SEQ ID NO: 6040 - RNA, 21 nt, Artificial Sequence
  siRNA sense strand against b2GPI
  modified_base (1)..(1): 2'-deoxy-2'-fluoroadenosine
  modified_base (2)..(2): 2'-O-methyladenosine
  misc_feature (2)..(3): 5'-phosphonothioate
  modified_base (3)..(3): 2'-deoxy-2'-fluoroguanosine
  modified_base (4)..(4): cm
  modified_base (5)..(5): 2'-deoxy-2'-fluorocytidine
  modified_base (6)..(6): 2'-O-methyladenosine
  modified_base (7)..(7): 2'-deoxy-2'-fluorouridine
  modified_base (8)..(8): gm
  modified_base (9)..(9): 2'-deoxy-2'-fluorocytidine
  modified_base (10)..(10): um
  modified_base (11)..(11): 2'-deoxy-2'-fluoroadenosine
  modified_base (12)..(12): 2'-deoxy-2'-fluoroadenosine
  modified_base (13)..(13): gm
  modified_base (14)..(14): 2'-deoxy-2'-fluoroguanosine
  modified_base (15)..(15): um
  modified_base (16)..(16): 2'-deoxy-2'-fluoroguanosine
  modified_base (17)..(17): gm
  modified_base (18)..(18): 2'-deoxy-2'-fluorouridine
  modified_base (19)..(19): um
  modified_base (20)..(20): 2'-deoxy-2'-fluorouridine
  modified_base (21)..(21): um
aagccaugcuaaggugguuuu

SEQ ID NO: 6041 - RNA, 21 nt, Artificial Sequence
  siRNA sense strand against b2GPI
  modified_base (1)..(1): 2'-deoxy-2'-fluoroadenosine
  modified_base (2)..(2): gm
  misc_feature (2)..(3): 5'-phosphonothioate
  modified_base (3)..(3): 2'-deoxy-2'-fluorocytidine
  modified_base (4)..(4): cm
  modified_base (5)..(5): 2'-deoxy-2'-fluoroadenosine
  modified_base (6)..(6): um
  modified_base (7)..(7): 2'-deoxy-2'-fluoroguanosine
  modified_base (8)..(8): cm
  modified_base (9)..(9): 2'-deoxy-2'-fluorouridine
  modified_base (10)..(10): 2'-O-methyladenosine
  modified_base (11)..(11): 2'-deoxy-2'-fluoroadenosine
  modified_base (12)..(12): 2'-deoxy-2'-fluoroguanosine
  modified_base (13)..(13): gm
  modified_base (14)..(14): 2'-deoxy-2'-fluorouridine
  modified_base (15)..(15): gm
  modified_base (16)..(16): 2'-deoxy-2'-fluoroguanosine
  modified_base (17)..(17): um
  modified_base (18)..(18): 2'-deoxy-2'-fluorouridine
  modified_base (19)..(19): um
  modified_base (20)..(20): 2'-deoxy-2'-fluorouridine
  modified_base (21)..(21): cm
agccaugcuaaggugguuuuc

SEQ ID NO: 6042 - RNA, 21 nt, Artificial Sequence
  siRNA sense strand against b2GPI
  modified_base (1)..(1): 2'-deoxy-2'-fluoroguanosine
  modified_base (2)..(2): cm
  misc_feature (2)..(3): 5'-phosphonothioate
  modified_base (3)..(3): 2'-deoxy-2'-fluorocytidine
  modified_base (4)..(4): 2'-O-methyladenosine
  modified_base (5)..(5): 2'-deoxy-2'-fluorouridine
  modified_base (6)..(6): gm
  modified_base (7)..(7): 2'-deoxy-2'-fluorocytidine
  modified_base (8)..(8): um
  modified_base (9)..(9): 2'-deoxy-2'-fluoroadenosine
  modified_base (10)..(10): 2'-O-methyladenosine
  modified_base (11)..(11): 2'-deoxy-2'-fluoroguanosine
  modified_base (12)..(12): 2'-deoxy-2'-fluoroguanosine
  modified_base (13)..(13): um
  modified_base (14)..(14): 2'-deoxy-2'-fluoroguanosine
  modified_base (15)..(15): gm
  modified_base (16)..(16): 2'-deoxy-2'-fluorouridine
  modified_base (17)..(17): um
  modified_base (18)..(18): 2'-deoxy-2'-fluorouridine
  modified_base (19)..(19): um
  modified_base (20)..(20): 2'-deoxy-2'-fluorocytidine
  modified_base (21)..(21): 2'-O-methyladenosine
gccaugcuaaggugguuuuca

SEQ ID NO: 6043 - RNA, 21 nt, Artificial Sequence
  siRNA sense strand against b2GPI
  modified_base (1)..(1): 2'-deoxy-2'-fluorocytidine
  modified_base (2)..(2): cm
  misc_feature (2)..(3): 5'-phosphonothioate
  modified_base (3)..(3): 2'-deoxy-2'-fluoroadenosine
  modified_base (4)..(4): um
  modified_base (5)..(5): 2'-deoxy-2'-fluoroguanosine
  modified_base (6)..(6): cm
  modified_base (7)..(7): 2'-deoxy-2'-fluorouridine
  modified_base (8)..(8): 2'-O-methyladenosine
  modified_base (9)..(9): 2'-deoxy-2'-fluoroadenosine
  modified_base (10)..(10): gm
  modified_base (11)..(11): 2'-deoxy-2'-fluoroguanosine
  modified_base (12)..(12): 2'-deoxy-2'-fluorouridine
  modified_base (13)..(13): gm
  modified_base (14)..(14): 2'-deoxy-2'-fluoroguanosine
  modified_base (15)..(15): um
  modified_base (16)..(16): 2'-deoxy-2'-fluorouridine
  modified_base (17)..(17): um
  modified_base (18)..(18): 2'-deoxy-2'-fluorouridine
  modified_base (19)..(19): cm
  modified_base (20)..(20): 2'-deoxy-2'-fluoroadenosine
  modified_base (21)..(21): gm
ccaugcuaaggugguuuucag

SEQ ID NO: 6044 - RNA, 21 nt, Artificial Sequence
  siRNA sense strand against b2GPI
  modified_base (1)..(1): 2'-deoxy-2'-fluorocytidine
  modified_base (2)..(2): 2'-O-methyladenosine
  misc_feature (2)..(3): 5'-phosphonothioate
  modified_base (3)..(3): 2'-deoxy-2'-fluorouridine
  modified_base (4)..(4): gm
  modified_base (5)..(5): 2'-deoxy-2'-fluorocytidine
  modified_base (6)..(6): um
  modified_base (7)..(7): 2'-deoxy-2'-fluoroadenosine
  modified_base (8)..(8): 2'-O-methyladenosine
  modified_base (9)..(9): 2'-deoxy-2'-fluoroguanosine
  modified_base (10)..(10): gm
  modified_base (11)..(11): 2'-deoxy-2'-fluorouridine
  modified_base (12)..(12): 2'-deoxy-2'-fluoroguanosine
  modified_base (13)..(13): gm
  modified_base (14)..(14): 2'-deoxy-2'-fluorouridine
  modified_base (15)..(15): um
  modified_base (16)..(16): 2'-deoxy-2'-fluorouridine
  modified_base (17)..(17): um
  modified_base (18)..(18): 2'-deoxy-2'-fluorocytidine
  modified_base (19)..(19): 2'-O-methyladenosine
  modified_base (20)..(20): 2'-deoxy-2'-fluoroguanosine
  modified_base (21)..(21): 2'-O-methyladenosine
caugcuaaggugguuuucaga

SEQ ID NO: 6045 - RNA, 21 nt, Artificial Sequence
  siRNA sense strand against b2GPI
  modified_base (1)..(1): 2'-deoxy-2'-fluorouridine
  modified_base (2)..(2): gm
  misc_feature (2)..(3): 5'-phosphonothioate
  modified_base (3)..(3): 2'-deoxy-2'-fluorocytidine
  modified_base (4)..(4): um
  modified_base (5)..(5): 2'-deoxy-2'-fluoroadenosine
  modified_base (6)..(6): 2'-O-methyladenosine
  modified_base (7)..(7): 2'-deoxy-2'-fluoroguanosine
  modified_base (8)..(8): gm
  modified_base (9)..(9): 2'-deoxy-2'-fluorouridine
  modified_base (10)..(10): gm
  modified_base (11)..(11): 2'-deoxy-2'-fluoroguanosine
  modified_base (12)..(12): 2'-deoxy-2'-fluorouridine
  modified_base (13)..(13): um
  modified_base (14)..(14): 2'-deoxy-2'-fluorouridine
  modified_base (15)..(15): um
  modified_base (16)..(16): 2'-deoxy-2'-fluorocytidine
  modified_base (17)..(17): 2'-O-methyladenosine
  modified_base (18)..(18): 2'-deoxy-2'-fluoroguanosine
  modified_base (19)..(19): 2'-O-methyladenosine
  modified_base (20)..(20): 2'-deoxy-2'-fluorouridine
  modified_base (21)..(21): um
ugcuaaggugguuuucagauu

SEQ ID NO: 6046 - RNA, 21 nt, Artificial Sequence
  siRNA sense strand against b2GPI
  modified_base (1)..(1): 2'-deoxy-2'-fluoroguanosine
  modified_base (2)..(2): cm
  misc_feature (2)..(3): 5'-phosphonothioate
  modified_base (3)..(3): 2'-deoxy-2'-fluorouridine
  modified_base (4)..(4): 2'-O-methyladenosine
  modified_base (5)..(5): 2'-deoxy-2'-fluoroadenosine
  modified_base (6)..(6): gm
  modified_base (7)..(7): 2'-deoxy-2'-fluoroguanosine
  modified_base (8)..(8): um
  modified_base (9)..(9): 2'-deoxy-2'-fluoroguanosine
  modified_base (10)..(10): gm
  modified_base (11)..(11): 2'-deoxy-2'-fluorouridine
  modified_base (12)..(12): 2'-deoxy-2'-fluorouridine
  modified_base (13)..(13): um
  modified_base (14)..(14): 2'-deoxy-2'-fluorouridine
  modified_base (15)..(15): cm
  modified_base (16)..(16): 2'-deoxy-2'-fluoroadenosine
  modified_base (17)..(17): gm
  modified_base (18)..(18): 2'-deoxy-2'-fluoroadenosine
  modified_base (19)..(19): um
  modified_base (20)..(20): 2'-deoxy-2'-fluorouridine
  modified_base (21)..(21): cm
gcuaaggugguuuucagauuc

SEQ ID NO: 6047 - RNA, 21 nt, Artificial Sequence
  siRNA sense strand against b2GPI
  modified_base (1)..(1): 2'-deoxy-2'-fluorouridine
  modified_base (2)..(2): 2'-O-methyladenosine
  misc_feature (2)..(3): 5'-phosphonothioate
  modified_base (3)..(3): 2'-deoxy-2'-fluoroadenosine
  modified_base (4)..(4): gm
  modified_base (5)..(5): 2'-deoxy-2'-fluoroguanosine
  modified_base (6)..(6): um
  modified_base (7)..(7): 2'-deoxy-2'-fluoroguanosine
  modified_base (8)..(8): gm
  modified_base (9)..(9): 2'-deoxy-2'-fluorouridine
  modified_base (10)..(10): um
  modified_base (11)..(11): 2'-deoxy-2'-fluorouridine
  modified_base (12)..(12): 2'-deoxy-2'-fluorouridine
  modified_base (13)..(13): cm
  modified_base (14)..(14): 2'-deoxy-2'-fluoroadenosine
  modified_base (15)..(15): gm
  modified_base (16)..(16): 2'-deoxy-2'-fluoroadenosine
  modified_base (17)..(17): um
  modified_base (18)..(18): 2'-deoxy-2'-fluorouridine
  modified_base (19)..(19): cm
  modified_base (20)..(20): 2'-deoxy-2'-fluorocytidine
  modified_base (21)..(21): 2'-O-methyladenosine
uaaggugguuuucagauucca

SEQ ID NO: 6048 - RNA, 21 nt, Artificial Sequence
  siRNA sense strand against b2GPI
  modified_base (1)..(1): 2'-deoxy-2'-fluoroadenosine
  modified_base (2)..(2): 2'-O-methyladenosine
  misc_feature (2)..(3): 5'-phosphonothioate
  modified_base (3)..(3): 2'-deoxy-2'-fluoroguanosine
  modified_base (4)..(4): gm
  modified_base (5)..(5): 2'-deoxy-2'-fluorouridine
  modified_base (6)..(6): gm
  modified_base (7)..(7): 2'-deoxy-2'-fluoroguanosine
  modified_base (8)..(8): um
  modified_base (9)..(9): 2'-deoxy-2'-fluorouridine
  modified_base (10)..(10): um
  modified_base (11)..(11): 2'-deoxy-2'-fluorouridine
  modified_base (12)..(12): 2'-deoxy-2'-fluorocytidine
  modified_base (13)..(13): 2'-O-methyladenosine
  modified_base (14)..(14): 2'-deoxy-2'-fluoroguanosine
  modified_base (15)..(15): 2'-O-methyladenosine
  modified_base (16)..(16): 2'-deoxy-2'-fluorouridine
  modified_base (17)..(17): um
  modified_base (18)..(18): 2'-deoxy-2'-fluorocytidine
  modified_base (19)..(19): cm
  modified_base (20)..(20): 2'-deoxy-2'-fluoroadenosine
  modified_base (21)..(21): cm
aaggugguuuucagauuccac

SEQ ID NO: 6049 - RNA, 21 nt, Artificial Sequence
  siRNA sense strand against b2GPI
  modified_base (1)..(1): 2'-deoxy-2'-fluoroadenosine
  modified_base (2)..(2): gm
  misc_feature (2)..(3): 5'-phosphonothioate
  modified_base (3)..(3): 2'-deoxy-2'-fluoroguanosine
  modified_base (4)..(4): um
  modified_base (5)..(5): 2'-deoxy-2'-fluoroguanosine
  modified_base (6)..(6): gm
  modified_base (7)..(7): 2'-deoxy-2'-fluorouridine
  modified_base (8)..(8): um
  modified_base (9)..(9): 2'-deoxy-2'-fluorouridine
  modified_base (10)..(10): um
  modified_base (11)..(11): 2'-deoxy-2'-fluorocytidine
  modified_base (12)..(12): 2'-deoxy-2'-fluoroadenosine
  modified_base (13)..(13): gm
  modified_base (14)..(14): 2'-deoxy-2'-fluoroadenosine
  modified_base (15)..(15): um
  modified_base (16)..(16): 2'-deoxy-2'-fluorouridine
  modified_base (17)..(17): cm
  modified_base (18)..(18): 2'-deoxy-2'-fluorocytidine
  modified_base (19)..(19): 2'-O-methyladenosine
  modified_base (20)..(20): 2'-deoxy-2'-fluorocytidine
  modified_base (21)..(21): 2'-O-methyladenosine
aggugguuuucagauuccaca

SEQ ID NO: 6050 - RNA, 21 nt, Artificial Sequence
  siRNA sense strand against b2GPI
  modified_base (1)..(1): 2'-deoxy-2'-fluoroguanosine
  modified_base (2)..(2): um
  misc_feature (2)..(3): 5'-phosphonothioate
  modified_base (3)..(3): 2'-deoxy-2'-fluoroguanosine
  modified_base (4)..(4): gm
  modified_base (5)..(5): 2'-deoxy-2'-fluorouridine
  modified_base (6)..(6): um
  modified_base (7)..(7): 2'-deoxy-2'-fluorouridine
  modified_base (8)..(8): um
  modified_base (9)..(9): 2'-deoxy-2'-fluorocytidine
  modified_base (10)..(10): 2'-O-methyladenosine
  modified_base (11)..(11): 2'-deoxy-2'-fluoroguanosine
  modified_base (12)..(12): 2'-deoxy-2'-fluoroadenosine
  modified_base (13)..(13): um
  modified_base (14)..(14): 2'-deoxy-2'-fluorouridine
  modified_base (15)..(15): cm
  modified_base (16)..(16): 2'-deoxy-2'-fluorocytidine
  modified_base (17)..(17): 2'-O-methyladenosine
  modified_base (18)..(18): 2'-deoxy-2'-fluorocytidine
  modified_base (19)..(19): 2'-O-methyladenosine
  modified_base (20)..(20): 2'-deoxy-2'-fluorocytidine
  modified_base (21)..(21): 2'-O-methyladenosine
gugguuuucagauuccacaca

SEQ ID NO: 6051 - RNA, 21 nt, Artificial Sequence
  siRNA sense strand against b2GPI
  modified_base (1)..(1): 2'-deoxy-2'-fluorouridine
  modified_base (2)..(2): gm
  misc_feature (2)..(3): 5'-phosphonothioate
  modified_base (3)..(3): 2'-deoxy-2'-fluoroguanosine
  modified_base (4)..(4): um
  modified_base (5)..(5): 2'-deoxy-2'-fluorouridine
  modified_base (6)..(6): um
  modified_base (7)..(7): 2'-deoxy-2'-fluorouridine
  modified_base (8)..(8): cm
  modified_base (9)..(9): 2'-deoxy-2'-fluoroadenosine
  modified_base (10)..(10): gm
  modified_base (11)..(11): 2'-deoxy-2'-fluoroadenosine
  modified_base (12)..(12): 2'-deoxy-2'-fluorouridine
  modified_base (13)..(13): um
  modified_base (14)..(14): 2'-deoxy-2'-fluorocytidine
  modified_base (15)..(15): cm
  modified_base (16)..(16): 2'-deoxy-2'-fluoroadenosine
  modified_base (17)..(17): cm
  modified_base (18)..(18): 2'-deoxy-2'-fluoroadenosine
  modified_base (19)..(19): cm
  modified_base (20)..(20): 2'-deoxy-2'-fluoroadenosine
  modified_base (21)..(21): 2'-O-methyladenosine
ugguuuucagauuccacacaa

SEQ ID NO: 6052 - RNA, 21 nt, Artificial Sequence
  siRNA sense strand against b2GPI
  modified_base (1)..(1): 2'-deoxy-2'-fluoroguanosine
  modified_base (2)..(2): gm
  misc_feature (2)..(3): 5'-phosphonothioate
  modified_base (3)..(3): 2'-deoxy-2'-fluorouridine
  modified_base (4)..(4): um
  modified_base (5)..(5): 2'-deoxy-2'-fluorouridine
  modified_base (6)..(6): um
  modified_base (7)..(7): 2'-deoxy-2'-fluorocytidine
  modified_base (8)..(8): 2'-O-methyladenosine
  modified_base (9)..(9): 2'-deoxy-2'-fluoroguanosine
  modified_base (10)..(10): 2'-O-methyladenosine
  modified_base (11)..(11): 2'-deoxy-2'-fluorouridine
  modified_base (12)..(12): 2'-deoxy-2'-fluorouridine
  modified_base (13)..(13): cm
  modified_base (14)..(14): 2'-deoxy-2'-fluorocytidine
  modified_base (15)..(15): 2'-O-methyladenosine
  modified_base (16)..(16): 2'-deoxy-2'-fluorocytidine
  modified_base (17)..(17): 2'-O-methyladenosine
  modified_base (18)..(18): 2'-deoxy-2'-fluorocytidine
  modified_base (19)..(19): 2'-O-methyladenosine
  modified_base (20)..(20): 2'-deoxy-2'-fluoroadenosine
  modified_base (21)..(21): 2'-O-methyladenosine
gguuuucagauuccacacaaa

SEQ ID NO: 6053 - RNA, 21 nt, Artificial Sequence
  siRNA sense strand against b2GPI
  modified_base (1)..(1): 2'-deoxy-2'-fluoroguanosine
  modified_base (2)..(2): um
  misc_feature (2)..(3): 5'-phosphonothioate
  modified_base (3)..(3): 2'-deoxy-2'-fluorouridine
  modified_base (4)..(4): um
  modified_base (5)..(5): 2'-deoxy-2'-fluorouridine
  modified_base (6)..(6): cm
  modified_base (7)..(7): 2'-deoxy-2'-fluoroadenosine
  modified_base (8)..(8): gm
  modified_base (9)..(9): 2'-deoxy-2'-fluoroadenosine
  modified_base (10)..(10): um
  modified_base (11)..(11): 2'-deoxy-2'-fluorouridine
  modified_base (12)..(12): 2'-deoxy-2'-fluorocytidine
  modified_base (13)..(13): cm
  modified_base (14)..(14): 2'-deoxy-2'-fluoroadenosine
  modified_base (15)..(15): cm
  modified_base (16)..(16): 2'-deoxy-2'-fluoroadenosine
  modified_base (17)..(17): cm
  modified_base (18)..(18): 2'-deoxy-2'-fluoroadenosine
  modified_base (19)..(19): 2'-O-methyladenosine
  modified_base (20)..(20): 2'-deoxy-2'-fluoroadenosine
  modified_base (21)..(21): 2'-O-methyladenosine
guuuucagauuccacacaaaa

SEQ ID NO: 6054 - RNA, 21 nt, Artificial Sequence
  siRNA sense strand against b2GPI
  modified_base (1)..(1): 2'-deoxy-2'-fluorouridine
  modified_base (2)..(2): um
  misc_feature (2)..(3): 5'-phosphonothioate
  modified_base (3)..(3): 2'-deoxy-2'-fluorouridine
  modified_base (4)..(4): um
  modified_base (5)..(5): 2'-deoxy-2'-fluorocytidine
  modified_base (6)..(6): 2'-O-methyladenosine
  modified_base (7)..(7): 2'-deoxy-2'-fluoroguanosine
  modified_base (8)..(8): 2'-O-methyladenosine
  modified_base (9)..(9): 2'-deoxy-2'-fluorouridine
  modified_base (10)..(10): um
  modified_base (11)..(11): 2'-deoxy-2'-fluorocytidine
  modified_base (12)..(12): 2'-deoxy-2'-fluorocytidine
  modified_base (13)..(13): 2'-O-methyladenosine
  modified_base (14)..(14): 2'-deoxy-2'-fluorocytidine
  modified_base (15)..(15): 2'-O-methyladenosine
  modified_base (16)..(16): 2'-deoxy-2'-fluorocytidine
  modified_base (17)..(17): 2'-O-methyladenosine
  modified_base (18)..(18): 2'-deoxy-2'-fluoroadenosine
  modified_base (19)..(19): 2'-O-methyladenosine
  modified_base (20)..(20): 2'-deoxy-2'-fluoroadenosine
  modified_base (21)..(21): um
uuuucagauuccacacaaaau

SEQ ID NO: 6055 - RNA, 21 nt, Artificial Sequence
  siRNA sense strand against b2GPI
  modified_base (1)..(1): 2'-deoxy-2'-fluorouridine
  modified_base (2)..(2): um
  misc_feature (2)..(3): 5'-phosphonothioate
  modified_base (3)..(3): 2'-deoxy-2'-fluorouridine
  modified_base (4)..(4): cm
  modified_base (5)..(5): 2'-deoxy-2'-fluoroadenosine
  modified_base (6)..(6): gm
  modified_base (7)..(7): 2'-deoxy-2'-fluoroadenosine
  modified_base (8)..(8): um
  modified_base (9)..(9): 2'-deoxy-2'-fluorouridine
  modified_base (10)..(10): cm
  modified_base (11)..(11): 2'-deoxy-2'-fluorocytidine
  modified_base (12)..(12): 2'-deoxy-2'-fluoroadenosine
  modified_base (13)..(13): cm
  modified_base (14)..(14): 2'-deoxy-2'-fluoroadenosine
  modified_base (15)..(15): cm
  modified_base (16)..(16): 2'-deoxy-2'-fluoroadenosine
  modified_base (17)..(17): 2'-O-methyladenosine
  modified_base (18)..(18): 2'-deoxy-2'-fluoroadenosine
  modified_base (19)..(19): 2'-O-methyladenosine
  modified_base (20)..(20): 2'-deoxy-2'-fluorouridine
  modified_base (21)..(21): gm
uuucagauuccacacaaaaug

SEQ ID NO: 6056 - RNA, 21 nt, Artificial Sequence
  siRNA sense strand against b2GPI
  modified_base (1)..(1): 2'-deoxy-2'-fluorouridine
  modified_base (2)..(2): um
  misc_feature (2)..(3): 5'-phosphonothioate
  modified_base (3)..(3): 2'-deoxy-2'-fluorocytidine
  modified_base (4)..(4): 2'-O-methyladenosine
  modified_base (5)..(5): 2'-deoxy-2'-fluoroguanosine
  modified_base (6)..(6): 2'-O-methyladenosine
  modified_base (7)..(7): 2'-deoxy-2'-fluorouridine
  modified_base (8)..(8): um
  modified_base (9)..(9): 2'-deoxy-2'-fluorocytidine
  modified_base (10)..(10): cm
  modified_base (11)..(11): 2'-deoxy-2'-fluoroadenosine
  modified_base (12)..(12): 2'-deoxy-2'-fluorocytidine
  modified_base (13)..(13): 2'-O-methyladenosine
  modified_base (14)..(14): 2'-deoxy-2'-fluorocytidine
  modified_base (15)..(15): 2'-O-methyladenosine
  modified_base (16)..(16): 2'-deoxy-2'-fluoroadenosine
  modified_base (17)..(17): 2'-O-methyladenosine
  modified_base (18)..(18): 2'-deoxy-2'-fluoroadenosine
  modified_base (19)..(19): um
  modified_base (20)..(20): 2'-deoxy-2'-fluoroguanosine
  modified_base (21)..(21): um
uucagauuccacacaaaaugu

SEQ ID NO: 6057 - RNA, 21 nt, Artificial Sequence
  siRNA sense strand against b2GPI
  modified_base (1)..(1): 2'-deoxy-2'-fluorouridine
  modified_base (2)..(2): cm
  misc_feature (2)..(3): 5'-phosphonothioate
  modified_base (3)..(3): 2'-deoxy-2'-fluoroadenosine
  modified_base (4)..(4): gm
  modified_base (5)..(5): 2'-deoxy-2'-fluoroadenosine
  modified_base (6)..(6): um
  modified_base (7)..(7): 2'-deoxy-2'-fluorouridine
  modified_base (8)..(8): cm
  modified_base (9)..(9): 2'-deoxy-2'-fluorocytidine
  modified_base (10)..(10): 2'-O-methyladenosine
  modified_base (11)..(11): 2'-deoxy-2'-fluorocytidine
  modified_base (12)..(12): 2'-deoxy-2'-fluoroadenosine
  modified_base (13)..(13): cm
  modified_base (14)..(14): 2'-deoxy-2'-fluoroadenosine
  modified_base (15)..(15): 2'-O-methyladenosine
  modified_base (16)..(16): 2'-deoxy-2'-fluoroadenosine
  modified_base (17)..(17): 2'-O-methyladenosine
  modified_base (18)..(18): 2'-deoxy-2'-fluorouridine
  modified_base (19)..(19): gm
  modified_base (20)..(20): 2'-deoxy-2'-fluorouridine
  modified_base (21)..(21): cm
ucagauuccacacaaaauguc

SEQ ID NO: 6058 - RNA, 21 nt, Artificial Sequence
  siRNA sense strand against b2GPI
  modified_base (1)..(1): 2'-deoxy-2'-fluorocytidine
  modified_base (2)..(2): 2'-O-methyladenosine
  misc_feature (2)..(3): 5'-phosphonothioate
  modified_base (3)..(3): 2'-deoxy-2'-fluoroguanosine
  modified_base (4)..(4): 2'-O-methyladenosine
  modified_base (5)..(5): 2'-deoxy-2'-fluorouridine
  modified_base (6)..(6): um
  modified_base (7)..(7): 2'-deoxy-2'-fluorocytidine
  modified_base (8)..(8): cm
  modified_base (9)..(9): 2'-deoxy-2'-fluoroadenosine
  modified_base (10)..(10): cm
  modified_base (11)..(11): 2'-deoxy-2'-fluoroadenosine
  modified_base (12)..(12): 2'-deoxy-2'-fluorocytidine
  modified_base (13)..(13): 2'-O-methyladenosine
  modified_base (14)..(14): 2'-deoxy-2'-fluoroadenosine
  modified_base (15)..(15): 2'-O-methyladenosine
  modified_base (16)..(16): 2'-deoxy-2'-fluoroadenosine
  modified_base (17)..(17): um
  modified_base (18)..(18): 2'-deoxy-2'-fluoroguanosine
  modified_base (19)..(19): um
  modified_base (20)..(20): 2'-deoxy-2'-fluorocytidine
  modified_base (21)..(21): 2'-O-methyladenosine
cagauuccacacaaaauguca

SEQ ID NO: 6059 - RNA, 21 nt, Artificial Sequence
  siRNA sense strand against b2GPI
  modified_base (1)..(1): 2'-deoxy-2'-fluoroguanosine
  modified_base (2)..(2): 2'-O-methyladenosine
  misc_feature (2)..(3): 5'-phosphonothioate
  modified_base (3)..(3): 2'-deoxy-2'-fluorouridine
  modified_base (4)..(4): um
  modified_base (5)..(5): 2'-deoxy-2'-fluorocytidine
  modified_base (6)..(6): cm
  modified_base (7)..(7): 2'-deoxy-2'-fluoroadenosine
  modified_base (8)..(8): cm
  modified_base (9)..(9): 2'-deoxy-2'-fluoroadenosine
  modified_base (10)..(10): cm
  modified_base (11)..(11): 2'-deoxy-2'-fluoroadenosine
  modified_base (12)..(12): 2'-deoxy-2'-fluoroadenosine
  modified_base (13)..(13): 2'-O-methyladenosine
  modified_base (14)..(14): 2'-deoxy-2'-fluoroadenosine
  modified_base (15)..(15): um
  modified_base (16)..(16): 2'-deoxy-2'-fluoroguanosine
  modified_base (17)..(17): um
  modified_base (18)..(18): 2'-deoxy-2'-fluorocytidine
  modified_base (19)..(19): 2'-O-methyladenosine
  modified_base (20)..(20): 2'-deoxy-2'-fluorocytidine
  modified_base (21)..(21): 2'-O-methyladenosine
gauuccacacaaaaugucaca

SEQ ID NO: 6060 - RNA, 21 nt, Artificial Sequence
  siRNA sense strand against b2GPI
  modified_base (1)..(1): 2'-deoxy-2'-fluorouridine
  modified_base (2)..(2): um
  misc_feature (2)..(3): 5'-phosphonothioate
  modified_base (3)..(3): 2'-deoxy-2'-fluorocytidine
  modified_base (4)..(4): cm
  modified_base (5)..(5): 2'-deoxy-2'-fluoroadenosine
  modified_base (6)..(6): cm
  modified_base (7)..(7): 2'-deoxy-2'-fluoroadenosine
  modified_base (8)..(8): cm
  modified_base (9)..(9): 2'-deoxy-2'-fluoroadenosine
  modified_base (10)..(10): 2'-O-methyladenosine
  modified_base (11)..(11): 2'-deoxy-2'-fluoroadenosine
  modified_base (12)..(12): 2'-deoxy-2'-fluoroadenosine
  modified_base (13)..(13): um
  modified_base (14)..(14): 2'-deoxy-2'-fluoroguanosine
  modified_base (15)..(15): um
  modified_base (16)..(16): 2'-deoxy-2'-fluorocytidine
  modified_base (17)..(17): 2'-O-methyladenosine
  modified_base (18)..(18): 2'-deoxy-2'-fluorocytidine
  modified_base (19)..(19): 2'-O-methyladenosine
  modified_base (20)..(20): 2'-deoxy-2'-fluorocytidine
  modified_base (21)..(21): um
uuccacacaaaaugucacacu

SEQ ID NO: 6061 - RNA, 21 nt, Artificial Sequence
  siRNA sense strand against b2GPI
  modified_base (1)..(1): 2'-deoxy-2'-fluorouridine
  modified_base (2)..(2): cm
  misc_feature (2)..(3): 5'-phosphonothioate
  modified_base (3)..(3): 2'-deoxy-2'-fluorocytidine
  modified_base (4)..(4): 2'-O-methyladenosine
  modified_base (5)..(5): 2'-deoxy-2'-fluorocytidine
  modified_base (6)..(6): 2'-O-methyladenosine
  modified_base (7)..(7): 2'-deoxy-2'-fluorocytidine
  modified_base (8)..(8): 2'-O-methyladenosine
  modified_base (9)..(9): 2'-deoxy-2'-fluoroadenosine
  modified_base (10)..(10): 2'-O-methyladenosine
  modified_base (11)..(11): 2'-deoxy-2'-fluoroadenosine
  modified_base (12)..(12): 2'-deoxy-2'-fluorouridine
  modified_base (13)..(13): gm
  modified_base (14)..(14): 2'-deoxy-2'-fluorouridine
  modified_base (15)..(15): cm
  modified_base (16)..(16): 2'-deoxy-2'-fluoroadenosine
  modified_base (17)..(17): cm
  modified_base (18)..(18): 2'-deoxy-2'-fluoroadenosine
  modified_base (19)..(19): cm
  modified_base (20)..(20): 2'-deoxy-2'-fluorouridine
  modified_base (21)..(21): um
uccacacaaaaugucacacuu

SEQ ID NO: 6062 - RNA, 21 nt, Artificial Sequence
  siRNA sense strand against b2GPI
  modified_base (1)..(1): 2'-deoxy-2'-fluorocytidine
  modified_base (2)..(2): cm
  misc_feature (2)..(3): 5'-phosphonothioate
  modified_base (3)..(3): 2'-deoxy-2'-fluoroadenosine
  modified_base (4)..(4): cm
  modified_base (5)..(5): 2'-deoxy-2'-fluoroadenosine
  modified_base (6)..(6): cm
  modified_base (7)..(7): 2'-deoxy-2'-fluoroadenosine
  modified_base (8)..(8): 2'-O-methyladenosine
  modified_base (9)..(9): 2'-deoxy-2'-fluoroadenosine
  modified_base (10)..(10): 2'-O-methyladenosine
  modified_base (11)..(11): 2'-deoxy-2'-fluorouridine
  modified_base (12)..(12): 2'-deoxy-2'-fluoroguanosine
  modified_base (13)..(13): um
  modified_base (14)..(14): 2'-deoxy-2'-fluorocytidine
  modified_base (15)..(15): 2'-O-methyladenosine
  modified_base (16)..(16): 2'-deoxy-2'-fluorocytidine
  modified_base (17)..(17): 2'-O-methyladenosine
  modified_base (18)..(18): 2'-deoxy-2'-fluorocytidine
  modified_base (19)..(19): um
  modified_base (20)..(20): 2'-deoxy-2'-fluorouridine
  modified_base (21)..(21): gm
ccacacaaaaugucacacuug

SEQ ID NO: 6063 - RNA, 21 nt, Artificial Sequence
  siRNA sense strand against b2GPI
  modified_base (1)..(1): 2'-deoxy-2'-fluorocytidine
  modified_base (2)..(2): 2'-O-methyladenosine
  misc_feature (2)..(3): 5'-phosphonothioate
  modified_base (3)..(3): 2'-deoxy-2'-fluorocytidine
  modified_base (4)..(4): 2'-O-methyladenosine
  modified_base (5)..(5): 2'-deoxy-2'-fluorocytidine
  modified_base (6)..(6): 2'-O-methyladenosine
  modified_base (7)..(7): 2'-deoxy-2'-fluoroadenosine
  modified_base (8)..(8): 2'-O-methyladenosine
  modified_base (9)..(9): 2'-deoxy-2'-fluoroadenosine
  modified_base (10)..(10): um
  modified_base (11)..(11): 2'-deoxy-2'-fluoroguanosine
  modified_base (12)..(12): 2'-deoxy-2'-fluorouridine
  modified_base (13)..(13): cm
  modified_base (14)..(14): 2'-deoxy-2'-fluoroadenosine
  modified_base (15)..(15): cm
  modified_base (16)..(16): 2'-deoxy-2'-fluoroadenosine
  modified_base (17)..(17): cm
  modified_base (18)..(18): 2'-deoxy-2'-fluorouridine
  modified_base (19)..(19): um
  modified_base (20)..(20): 2'-deoxy-2'-fluoroguanosine
  modified_base (21)..(21): um
cacacaaaaugucacacuugu

SEQ ID NO: 6064 - RNA, 21 nt, Artificial Sequence
  siRNA sense strand against b2GPI
  modified_base (1)..(1): 2'-deoxy-2'-fluoroadenosine
  modified_base (2)..(2): cm
  misc_feature (2)..(3): 5'-phosphonothioate
  modified_base (3)..(3): 2'-deoxy-2'-fluoroadenosine
  modified_base (4)..(4): cm
  modified_base (5)..(5): 2'-deoxy-2'-fluoroadenosine
  modified_base (6)..(6): 2'-O-methyladenosine
  modified_base (7)..(7): 2'-deoxy-2'-fluoroadenosine
  modified_base (8)..(8): 2'-O-methyladenosine
  modified_base (9)..(9): 2'-deoxy-2'-fluorouridine
  modified_base (10)..(10): gm
  modified_base (11)..(11): 2'-deoxy-2'-fluorouridine
  modified_base (12)..(12): 2'-deoxy-2'-fluorocytidine
  modified_base (13)..(13): 2'-O-methyladenosine
  modified_base (14)..(14): 2'-deoxy-2'-fluorocytidine
  modified_base (15)..(15): 2'-O-methyladenosine
  modified_base (16)..(16): 2'-deoxy-2'-fluorocytidine
  modified_base (17)..(17): um
  modified_base (18)..(18): 2'-deoxy-2'-fluorouridine
  modified_base (19)..(19): gm
  modified_base (20)..(20): 2'-deoxy-2'-fluorouridine
  modified_base (21)..(21): um
acacaaaaugucacacuuguu

SEQ ID NO: 6065 - RNA, 21 nt, Artificial Sequence
  siRNA sense strand against b2GPI
  modified_base (1)..(1): 2'-deoxy-2'-fluorocytidine
  modified_base (2)..(2): 2'-O-methyladenosine
  misc_feature (2)..(3): 5'-phosphonothioate
  modified_base (3)..(3): 2'-deoxy-2'-fluorocytidine
  modified_base (4)..(4): 2'-O-methyladenosine
  modified_base (5)..(5): 2'-deoxy-2'-fluoroadenosine
  modified_base (6)..(6): 2'-O-methyladenosine
  modified_base (7)..(7): 2'-deoxy-2'-fluoroadenosine
  modified_base (8)..(8): um
  modified_base (9)..(9): 2'-deoxy-2'-fluoroguanosine
  modified_base (10)..(10): um
  modified_base (11)..(11): 2'-deoxy-2'-fluorocytidine
  modified_base (12)..(12): 2'-deoxy-2'-fluoroadenosine
  modified_base (13)..(13): cm
  modified_base (14)..(14): 2'-deoxy-2'-fluoroadenosine
  modified_base (15)..(15): cm
  modified_base (16)..(16): 2'-deoxy-2'-fluorouridine
  modified_base (17)..(17): um
  modified_base (18)..(18): 2'-deoxy-2'-fluoroguanosine
  modified_base (19)..(19): um
  modified_base (20)..(20): 2'-deoxy-2'-fluorouridine
  modified_base (21)..(21): um
cacaaaaugucacacuuguuu

SEQ ID NO: 6066 - RNA, 21 nt, Artificial Sequence
  siRNA sense strand against b2GPI
  modified_base (1)..(1): 2'-deoxy-2'-fluorocytidine
  modified_base (2)..(2): 2'-O-methyladenosine
  misc_feature (2)..(3): 5'-phosphonothioate
  modified_base (3)..(3): 2'-deoxy-2'-fluoroadenosine
  modified_base (4)..(4): 2'-O-methyladenosine
  modified_base (5)..(5): 2'-deoxy-2'-fluoroadenosine
  modified_base (6)..(6): um
  modified_base (7)..(7): 2'-deoxy-2'-fluoroguanosine
  modified_base (8)..(8): um
  modified_base (9)..(9): 2'-deoxy-2'-fluorocytidine
  modified_base (10)..(10): 2'-O-methyladenosine
  modified_base (11)..(11): 2'-deoxy-2'-fluorocytidine
  modified_base (12)..(12): 2'-deoxy-2'-fluoroadenosine
  modified_base (13)..(13): cm
  modified_base (14)..(14): 2'-deoxy-2'-fluorouridine
  modified_base (15)..(15): um
  modified_base (16)..(16): 2'-deoxy-2'-fluoroguanosine
  modified_base (17)..(17): um
  modified_base (18)..(18): 2'-deoxy-2'-fluorouridine
  modified_base (19)..(19): um
  modified_base (20)..(20): 2'-deoxy-2'-fluorocytidine
  modified_base (21)..(21): um
caaaaugucacacuuguuucu

SEQ ID NO: 6067 - RNA, 21 nt, Artificial Sequence
  siRNA sense strand against b2GPI
  modified_base (1)..(1): 2'-deoxy-2'-fluoroadenosine
  modified_base (2)..(2): 2'-O-methyladenosine
  misc_feature (2)..(3): 5'-phosphonothioate
  modified_base (3)..(3): 2'-deoxy-2'-fluoroadenosine
  modified_base (4)..(4): um
  modified_base (5)..(5): 2'-deoxy-2'-fluoroguanosine
  modified_base (6)..(6): um
  modified_base (7)..(7): 2'-deoxy-2'-fluorocytidine
  modified_base (8)..(8): 2'-O-methyladenosine
  modified_base (9)..(9): 2'-deoxy-2'-fluorocytidine
  modified_base (10)..(10): 2'-O-methyladenosine
  modified_base (11)..(11): 2'-deoxy-2'-fluorocytidine
  modified_base (12)..(12): 2'-deoxy-2'-fluorouridine
  modified_base (13)..(13): um
  modified_base (14)..(14): 2'-deoxy-2'-fluoroguanosine
  modified_base (15)..(15): um
  modified_base (16)..(16): 2'-deoxy-2'-fluorouridine
  modified_base (17)..(17): um
  modified_base (18)..(18): 2'-deoxy-2'-fluorocytidine
  modified_base (19)..(19): um
  modified_base (20)..(20): 2'-deoxy-2'-fluorouridine
  modified_base (21)..(21): gm
aaaugucacacuuguuucuug

SEQ ID NO: 6068 - RNA, 21 nt, Artificial Sequence
  siRNA sense strand against b2GPI
  modified_base (1)..(1): 2'-deoxy-2'-fluoroadenosine
  modified_base (2)..(2): 2'-O-methyladenosine
  misc_feature (2)..(3): 5'-phosphonothioate
  modified_base (3)..(3): 2'-deoxy-2'-fluorouridine
  modified_base (4)..(4): gm
  modified_base (5)..(5): 2'-deoxy-2'-fluorouridine
  modified_base (6)..(6): cm
  modified_base (7)..(7): 2'-deoxy-2'-fluoroadenosine
  modified_base (8)..(8): cm
  modified_base (9)..(9): 2'-deoxy-2'-fluoroadenosine
  modified_base (10)..(10): cm
  modified_base (11)..(11): 2'-deoxy-2'-fluorouridine
  modified_base (12)..(12): 2'-deoxy-2'-fluorouridine
  modified_base (13)..(13): gm
  modified_base (14)..(14): 2'-deoxy-2'-fluorouridine
  modified_base (15)..(15): um
  modified_base (16)..(16): 2'-deoxy-2'-fluorouridine
  modified_base (17)..(17): cm
  modified_base (18)..(18): 2'-deoxy-2'-fluorouridine
  modified_base (19)..(19): um
  modified_base (20)..(20): 2'-deoxy-2'-fluoroguanosine
  modified_base (21)..(21): um
aaugucacacuuguuucuugu

SEQ ID NO: 6069 - RNA, 21 nt, Artificial Sequence
  siRNA sense strand against b2GPI
  modified_base (1)..(1): 2'-deoxy-2'-fluoroadenosine
  modified_base (2)..(2): um
  misc_feature (2)..(3): 5'-phosphonothioate
  modified_base (3)..(3): 2'-deoxy-2'-fluoroguanosine
  modified_base (4)..(4): um
  modified_base (5)..(5): 2'-deoxy-2'-fluorocytidine
  modified_base (6)..(6): 2'-O-methyladenosine
  modified_base (7)..(7): 2'-deoxy-2'-fluorocytidine
  modified_base (8)..(8): 2'-O-methyladenosine
  modified_base (9)..(9): 2'-deoxy-2'-fluorocytidine
  modified_base (10)..(10): um
  modified_base (11)..(11): 2'-deoxy-2'-fluorouridine
  modified_base (12)..(12): 2'-deoxy-2'-fluoroguanosine
  modified_base (13)..(13): um
  modified_base (14)..(14): 2'-deoxy-2'-fluorouridine
  modified_base (15)..(15): um
  modified_base (16)..(16): 2'-deoxy-2'-fluorocytidine
  modified_base (17)..(17): um
  modified_base (18)..(18): 2'-deoxy-2'-fluorouridine
  modified_base (19)..(19): gm
  modified_base (20)..(20): 2'-deoxy-2'-fluorouridine
  modified_base (21)..(21): um
augucacacuuguuucuuguu

SEQ ID NO: 6070 - RNA, 21 nt, Artificial Sequence
  siRNA sense strand against b2GPI
  modified_base (1)..(1): 2'-deoxy-2'-fluoroguanosine
  modified_base (2)..(2): um
  misc_feature (2)..(3): 5'-phosphonothioate
  modified_base (3)..(3): 2'-deoxy-2'-fluorocytidine
  modified_base (4)..(4): 2'-O-methyladenosine
  modified_base (5)..(5): 2'-deoxy-2'-fluorocytidine
  modified_base (6)..(6): 2'-O-methyladenosine
  modified_base (7)..(7): 2'-deoxy-2'-fluorocytidine
  modified_base (8)..(8): um
  modified_base (9)..(9): 2'-deoxy-2'-fluorouridine
  modified_base (10)..(10): gm
  modified_base (11)..(11): 2'-deoxy-2'-fluorouridine
  modified_base (12)..(12): 2'-deoxy-2'-fluorouridine
  modified_base (13)..(13): um
  modified_base (14)..(14): 2'-deoxy-2'-fluorocytidine
  modified_base (15)..(15): um
  modified_base (16)..(16): 2'-deoxy-2'-fluorouridine
  modified_base (17)..(17): gm
  modified_base (18)..(18): 2'-deoxy-2'-fluorouridine
  modified_base (19)..(19): um
  modified_base (20)..(20): 2'-deoxy-2'-fluorocytidine
  modified_base (21)..(21): 2'-O-methyladenosine
gucacacuuguuucuuguuca

SEQ ID NO: 6071 - RNA, 21 nt, Artificial Sequence
  siRNA sense strand against b2GPI
  modified_base (1)..(1): 2'-deoxy-2'-fluorouridine
  modified_base (2)..(2): cm
  misc_feature (2)..(3): 5'-phosphonothioate
  modified_base (3)..(3): 2'-deoxy-2'-fluoroadenosine
  modified_base (4)..(4): cm
  modified_base (5)..(5): 2'-deoxy-2'-fluoroadenosine
  modified_base (6)..(6): cm
  modified_base (7)..(7): 2'-deoxy-2'-fluorouridine
  modified_base (8)..(8): um
  modified_base (9)..(9): 2'-deoxy-2'-fluoroguanosine
  modified_base (10)..(10): um
  modified_base (11)..(11): 2'-deoxy-2'-fluorouridine
  modified_base (12)..(12): 2'-deoxy-2'-fluorouridine
  modified_base (13)..(13): cm
  modified_base (14)..(14): 2'-deoxy-2'-fluorouridine
  modified_base (15)..(15): um
  modified_base (16)..(16): 2'-deoxy-2'-fluoroguanosine
  modified_base (17)..(17): um
  modified_base (18)..(18): 2'-deoxy-2'-fluorouridine
  modified_base (19)..(19): cm
  modified_base (20)..(20): 2'-deoxy-2'-fluoroadenosine
  modified_base (21)..(21): um
ucacacuuguuucuuguucau

SEQ ID NO: 6072 - RNA, 21 nt, Artificial Sequence
  siRNA sense strand against b2GPI
  modified_base (1)..(1): 2'-deoxy-2'-fluoroadenosine
  modified_base (2)..(2): cm
  misc_feature (2)..(3): 5'-phosphonothioate
  modified_base (3)..(3): 2'-deoxy-2'-fluoroadenosine
  modified_base (4)..(4): cm
  modified_base (5)..(5): 2'-deoxy-2'-fluorouridine
  modified_base (6)..(6): um
  modified_base (7)..(7): 2'-deoxy-2'-fluoroguanosine
  modified_base (8)..(8): um
  modified_base (9)..(9): 2'-deoxy-2'-fluorouridine
  modified_base (10)..(10): um
  modified_base (11)..(11): 2'-deoxy-2'-fluorocytidine
  modified_base (12)..(12): 2'-deoxy-2'-fluorouridine
  modified_base (13)..(13): um
  modified_base (14)..(14): 2'-deoxy-2'-fluoroguanosine
  modified_base (15)..(15): um
  modified_base (16)..(16): 2'-deoxy-2'-fluorouridine
  modified_base (17)..(17): cm
  modified_base (18)..(18): 2'-deoxy-2'-fluoroadenosine
  modified_base (19)..(19): um
  modified_base (20)..(20): 2'-deoxy-2'-fluorocytidine
  modified_base (21)..(21): cm
acacuuguuucuuguucaucc

SEQ ID NO: 6073 - RNA, 21 nt, Artificial Sequence
  siRNA sense strand against b2GPI
  modified_base (1)..(1): 2'-deoxy-2'-fluorocytidine
  modified_base (2)..(2): 2'-O-methyladenosine
  misc_feature (2)..(3): 5'-phosphonothioate
  modified_base (3)..(3): 2'-deoxy-2'-fluorocytidine
  modified_base (4)..(4): um
  modified_base (5)..(5): 2'-deoxy-2'-fluorouridine
  modified_base (6)..(6): gm
  modified_base (7)..(7): 2'-deoxy-2'-fluorouridine
  modified_base (8)..(8): um
  modified_base (9)..(9): 2'-deoxy-2'-fluorouridine
  modified_base (10)..(10): cm
  modified_base (11)..(11): 2'-deoxy-2'-fluorouridine
  modified_base (12)..(12): 2'-deoxy-2'-fluorouridine
  modified_base (13)..(13): gm
  modified_base (14)..(14): 2'-deoxy-2'-fluorouridine
  modified_base (15)..(15): um
  modified_base (16)..(16): 2'-deoxy-2'-fluorocytidine
  modified_base (17)..(17): 2'-O-methyladenosine
  modified_base (18)..(18): 2'-deoxy-2'-fluorouridine
  modified_base (19)..(19): cm
  modified_base (20)..(20): 2'-deoxy-2'-fluorocytidine
  modified_base (21)..(21): 2'-O-methyladenosine
cacuuguuucuuguucaucca

SEQ ID NO: 6074 - RNA, 21 nt, Artificial Sequence
  siRNA sense strand against b2GPI
  modified_base (1)..(1): 2'-deoxy-2'-fluoroadenosine
  modified_base (2)..(2): cm
  misc_feature (2)..(3): 5'-phosphonothioate
  modified_base (3)..(3): 2'-deoxy-2'-fluorouridine
  modified_base (4)..(4): um
  modified_base (5)..(5): 2'-deoxy-2'-fluoroguanosine
  modified_base (6)..(6): um
  modified_base (7)..(7): 2'-deoxy-2'-fluorouridine
  modified_base (8)..(8): um
  modified_base (9)..(9): 2'-deoxy-2'-fluorocytidine
  modified_base (10)..(10): um
  modified_base (11)..(11): 2'-deoxy-2'-fluorouridine
  modified_base (12)..(12): 2'-deoxy-2'-fluoroguanosine
  modified_base (13)..(13): um
  modified_base (14)..(14): 2'-deoxy-2'-fluorouridine
  modified_base (15)..(15): cm
  modified_base (16)..(16): 2'-deoxy-2'-fluoroadenosine
  modified_base (17)..(17): um
  modified_base (18)..(18): 2'-deoxy-2'-fluorocytidine
  modified_base (19)..(19): cm
  modified_base (20)..(20): 2'-deoxy-2'-fluoroadenosine
  modified_base (21)..(21): 2'-O-methyladenosine
acuuguuucuuguucauccaa

SEQ ID NO: 6075 - RNA, 21 nt, Artificial Sequence
  siRNA sense strand against b2GPI
  modified_base (1)..(1): 2'-deoxy-2'-fluorocytidine
  modified_base (2)..(2): um
  misc_feature (2)..(3): 5'-phosphonothioate
  modified_base (3)..(3): 2'-deoxy-2'-fluorouridine
  modified_base (4)..(4): gm
  modified_base (5)..(5): 2'-deoxy-2'-fluorouridine
  modified_base (6)..(6): um
  modified_base (7)..(7): 2'-deoxy-2'-fluorouridine
  modified_base (8)..(8): cm
  modified_base (9)..(9): 2'-deoxy-2'-fluorouridine
  modified_base (10)..(10): um
  modified_base (11)..(11): 2'-deoxy-2'-fluoroguanosine
  modified_base (12)..(12): 2'-deoxy-2'-fluorouridine
  modified_base (13)..(13): um
  modified_base (14)..(14): 2'-deoxy-2'-fluorocytidine
  modified_base (15)..(15): 2'-O-methyladenosine
  modified_base (16)..(16): 2'-deoxy-2'-fluorouridine
  modified_base (17)..(17): cm
  modified_base (18)..(18): 2'-deoxy-2'-fluorocytidine
  modified_base (19)..(19): 2'-O-methyladenosine
  modified_base (20)..(20): 2'-deoxy-2'-fluoroadenosine
  modified_base (21)..(21): gm
cuuguuucuuguucauccaag

SEQ ID NO: 6076 - RNA, 21 nt, Artificial Sequence
  siRNA sense strand against b2GPI
  modified_base (1)..(1): 2'-deoxy-2'-fluorouridine
  modified_base (2)..(2): um
  misc_feature (2)..(3): 5'-phosphonothioate
  modified_base (3)..(3): 2'-deoxy-2'-fluoroguanosine
  modified_base (4)..(4): um
  modified_base (5)..(5): 2'-deoxy-2'-fluorouridine
  modified_base (6)..(6): um
  modified_base (7)..(7): 2'-deoxy-2'-fluorocytidine
  modified_base (8)..(8): um
  modified_base (9)..(9): 2'-deoxy-2'-fluorouridine
  modified_base (10)..(10): gm
  modified_base (11)..(11): 2'-deoxy-2'-fluorouridine
  modified_base (12)..(12): 2'-deoxy-2'-fluorouridine
  modified_base (13)..(13): cm
  modified_base (14)..(14): 2'-deoxy-2'-fluoroadenosine
  modified_base (15)..(15): um
  modified_base (16)..(16): 2'-deoxy-2'-fluorocytidine
  modified_base (17)..(17): cm
  modified_base (18)..(18): 2'-deoxy-2'-fluoroadenosine
  modified_base (19)..(19): 2'-O-methyladenosine
  modified_base (20)..(20): 2'-deoxy-2'-fluoroguanosine
  modified_base (21)..(21): gm
uuguuucuuguucauccaagg

SEQ ID NO: 6077 - RNA, 21 nt, Artificial Sequence
  siRNA sense strand against b2GPI
  modified_base (1)..(1): 2'-deoxy-2'-fluoroguanosine
  modified_base (2)..(2): um
  misc_feature (2)..(3): 5'-phosphonothioate
  modified_base (3)..(3): 2'-deoxy-2'-fluorouridine
  modified_base (4)..(4): um
  modified_base (5)..(5): 2'-deoxy-2'-fluorocytidine
  modified_base (6)..(6): um
  modified_base (7)..(7): 2'-deoxy-2'-fluorouridine
  modified_base (8)..(8): gm
  modified_base (9)..(9): 2'-deoxy-2'-fluorouridine
  modified_base (10)..(10): um
  modified_base (11)..(11): 2'-deoxy-2'-fluorocytidine
  modified_base (12)..(12): 2'-deoxy-2'-fluoroadenosine
  modified_base (13)..(13): um
  modified_base (14)..(14): 2'-deoxy-2'-fluorocytidine
  modified_base (15)..(15): cm
  modified_base (16)..(16): 2'-deoxy-2'-fluoroadenosine
  modified_base (17)..(17): 2'-O-methyladenosine
  modified_base (18)..(18): 2'-deoxy-2'-fluoroguanosine
  modified_base (19)..(19): gm
  modified_base (20)..(20): 2'-deoxy-2'-fluoroadenosine
  modified_base (21)..(21): 2'-O-methyladenosine
guuucuuguucauccaaggaa

SEQ ID NO: 6078 - RNA, 21 nt, Artificial Sequence
  siRNA sense strand against b2GPI
  modified_base (1)..(1): 2'-deoxy-2'-fluorouridine
  modified_base (2)..(2): um
  misc_feature (2)..(3): 5'-phosphonothioate
  modified_base (3)..(3): 2'-deoxy-2'-fluorouridine
  modified_base (4)..(4): cm
  modified_base (5)..(5): 2'-deoxy-2'-fluorouridine
  modified_base (6)..(6): um
  modified_base (7)..(7): 2'-deoxy-2'-fluoroguanosine
  modified_base (8)..(8): um
  modified_base (9)..(9): 2'-deoxy-2'-fluorouridine
  modified_base (10)..(10): cm
  modified_base (11)..(11): 2'-deoxy-2'-fluoroadenosine
  modified_base (12)..(12): 2'-deoxy-2'-fluorouridine
  modified_base (13)..(13): cm
  modified_base (14)..(14): 2'-deoxy-2'-fluorocytidine
  modified_base (15)..(15): 2'-O-methyladenosine
  modified_base (16)..(16): 2'-deoxy-2'-fluoroadenosine
  modified_base (17)..(17): gm
  modified_base (18)..(18): 2'-deoxy-2'-fluoroguanosine
  modified_base (19)..(19): 2'-O-methyladenosine
  modified_base (20)..(20): 2'-deoxy-2'-fluoroadenosine
  modified_base (21)..(21): cm
uuucuuguucauccaaggaac

SEQ ID NO: 6079 - RNA, 21 nt, Artificial Sequence
  siRNA sense strand against b2GPI
  modified_base (1)..(1): 2'-deoxy-2'-fluorouridine
  modified_base (2)..(2): um
  misc_feature (2)..(3): 5'-phosphonothioate
  modified_base (3)..(3): 2'-deoxy-2'-fluorocytidine
  modified_base (4)..(4): um
  modified_base (5)..(5): 2'-deoxy-2'-fluorouridine
  modified_base (6)..(6): gm
  modified_base (7)..(7): 2'-deoxy-2'-fluorouridine
  modified_base (8)..(8): um
  modified_base (9)..(9): 2'-deoxy-2'-fluorocytidine
  modified_base (10)..(10): 2'-O-methyladenosine
  modified_base (11)..(11): 2'-deoxy-2'-fluorouridine
  modified_base (12)..(12): 2'-deoxy-2'-fluorocytidine
  modified_base (13)..(13): cm
  modified_base (14)..(14): 2'-deoxy-2'-fluoroadenosine
  modified_base (15)..(15): 2'-O-methyladenosine
  modified_base (16)..(16): 2'-deoxy-2'-fluoroguanosine
  modified_base (17)..(17): gm
  modified_base (18)..(18): 2'-deoxy-2'-fluoroadenosine
  modified_base (19)..(19): 2'-O-methyladenosine
  modified_base (20)..(20): 2'-deoxy-2'-fluorocytidine
  modified_base (21)..(21): cm
uucuuguucauccaaggaacc

SEQ ID NO: 6080 - RNA, 21 nt, Artificial Sequence
  siRNA sense strand against b2GPI
  modified_base (1)..(1): 2'-deoxy-2'-fluorouridine
  modified_base (2)..(2): cm
  misc_feature (2)..(3): 5'-phosphonothioate
  modified_base (3)..(3): 2'-deoxy-2'-fluorouridine
  modified_base (4)..(4): um
  modified_base (5)..(5): 2'-deoxy-2'-fluoroguanosine
  modified_base (6)..(6): um
  modified_base (7)..(7): 2'-deoxy-2'-fluorouridine
  modified_base (8)..(8): cm
  modified_base (9)..(9): 2'-deoxy-2'-fluoroadenosine
  modified_base (10)..(10): um
  modified_base (11)..(11): 2'-deoxy-2'-fluorocytidine
  modified_base (12)..(12): 2'-deoxy-2'-fluorocytidine
  modified_base (13)..(13): 2'-O-methyladenosine
  modified_base (14)..(14): 2'-deoxy-2'-fluoroadenosine
  modified_base (15)..(15): gm
  modified_base (16)..(16): 2'-deoxy-2'-fluoroguanosine
  modified_base (17)..(17): 2'-O-methyladenosine
  modified_base (18)..(18): 2'-deoxy-2'-fluoroadenosine
  modified_base (19)..(19): cm
  modified_base (20)..(20): 2'-deoxy-2'-fluorocytidine
  modified_base (21)..(21): um
ucuuguucauccaaggaaccu

SEQ ID NO: 6081 - RNA, 21 nt, Artificial Sequence
  siRNA sense strand against b2GPI
  modified_base (1)..(1): 2'-deoxy-2'-fluorocytidine
  modified_base (2)..(2): um
  misc_feature (2)..(3): 5'-phosphonothioate
  modified_base (3)..(3): 2'-deoxy-2'-fluorouridine
  modified_base (4)..(4): gm
  modified_base (5)..(5): 2'-deoxy-2'-fluorouridine
  modified_base (6)..(6): um
  modified_base (7)..(7): 2'-deoxy-2'-fluorocytidine
  modified_base (8)..(8): 2'-O-methyladenosine
  modified_base (9)..(9): 2'-deoxy-2'-fluorouridine
  modified_base (10)..(10): cm
  modified_base (11)..(11): 2'-deoxy-2'-fluorocytidine
  modified_base (12)..(12): 2'-deoxy-2'-fluoroadenosine
  modified_base (13)..(13): 2'-O-methyladenosine
  modified_base (14)..(14): 2'-deoxy-2'-fluoroguanosine
  modified_base (15)..(15): gm
  modified_base (16)..(16): 2'-deoxy-2'-fluoroadenosine
  modified_base (17)..(17): 2'-O-methyladenosine
  modified_base (18)..(18): 2'-deoxy-2'-fluorocytidine
  modified_base (19)..(19): cm
  modified_base (20)..(20): 2'-deoxy-2'-fluorouridine
  modified_base (21)..(21): 2'-O-methyladenosine
cuuguucauccaaggaaccua

SEQ ID NO: 6082 - RNA, 21 nt, Artificial Sequence
  siRNA sense strand against b2GPI
  modified_base (1)..(1): 2'-deoxy-2'-fluorouridine
  modified_base (2)..(2): um
  misc_feature (2)..(3): 5'-phosphonothioate
  modified_base (3)..(3): 2'-deoxy-2'-fluoroguanosine
  modified_base (4)..(4): um
  modified_base (5)..(5): 2'-deoxy-2'-fluorouridine
  modified_base (6)..(6): cm
  modified_base (7)..(7): 2'-deoxy-2'-fluoroadenosine
  modified_base (8)..(8): um
  modified_base (9)..(9): 2'-deoxy-2'-fluorocytidine
  modified_base (10)..(10): cm
  modified_base (11)..(11): 2'-deoxy-2'-fluoroadenosine
  modified_base (12)..(12): 2'-deoxy-2'-fluoroadenosine
  modified_base (13)..(13): gm
  modified_base (14)..(14): 2'-deoxy-2'-fluoroguanosine
  modified_base (15)..(15): 2'-O-methyladenosine
  modified_base (16)..(16): 2'-deoxy-2'-fluoroadenosine
  modified_base (17)..(17): cm
  modified_base (18)..(18): 2'-deoxy-2'-fluorocytidine
  modified_base (19)..(19): um
  modified_base (20)..(20): 2'-deoxy-2'-fluoroadenosine
  modified_base (21)..(21): 2'-O-methyladenosine
uuguucauccaaggaaccuaa

SEQ ID NO: 6083 - RNA, 21 nt, Artificial Sequence
  siRNA sense strand against b2GPI
  modified_base (1)..(1): 2'-deoxy-2'-fluorouridine
  modified_base (2)..(2): gm
  misc_feature (2)..(3): 5'-phosphonothioate
  modified_base (3)..(3): 2'-deoxy-2'-fluorouridine
  modified_base (4)..(4): um
  modified_base (5)..(5): 2'-deoxy-2'-fluorocytidine
  modified_base (6)..(6): 2'-O-methyladenosine
  modified_base (7)..(7): 2'-deoxy-2'-fluorouridine
  modified_base (8)..(8): cm
  modified_base (9)..(9): 2'-deoxy-2'-fluorocytidine
  modified_base (10)..(10): 2'-O-methyladenosine
  modified_base (11)..(11): 2'-deoxy-2'-fluoroadenosine
  modified_base (12)..(12): 2'-deoxy-2'-fluoroguanosine
  modified_base (13)..(13): gm
  modified_base (14)..(14): 2'-deoxy-2'-fluoroadenosine
  modified_base (15)..(15): 2'-O-methyladenosine
  modified_base (16)..(16): 2'-deoxy-2'-fluorocytidine
  modified_base (17)..(17): cm
  modified_base (18)..(18): 2'-deoxy-2'-fluorouridine
  modified_base (19)..(19): 2'-O-methyladenosine
  modified_base (20)..(20): 2'-deoxy-2'-fluoroadenosine
  modified_base (21)..(21): um
uguucauccaaggaaccuaau

SEQ ID NO: 6084 - RNA, 21 nt, Artificial Sequence
  siRNA sense strand against b2GPI
  modified_base (1)..(1): 2'-deoxy-2'-fluoroguanosine
  modified_base (2)..(2): um
  misc_feature (2)..(3): 5'-phosphonothioate
  modified_base (3)..(3): 2'-deoxy-2'-fluorouridine
  modified_base (4)..(4): cm
  modified_base (5)..(5): 2'-deoxy-2'-fluoroadenosine
  modified_base (6)..(6): um
  modified_base (7)..(7): 2'-deoxy-2'-fluorocytidine
  modified_base (8)..(8): cm
  modified_base (9)..(9): 2'-deoxy-2'-fluoroadenosine
  modified_base (10)..(10): 2'-O-methyladenosine
  modified_base (11)..(11): 2'-deoxy-2'-fluoroguanosine
  modified_base (12)..(12): 2'-deoxy-2'-fluoroguanosine
  modified_base (13)..(13): 2'-O-methyladenosine
  modified_base (14)..(14): 2'-deoxy-2'-fluoroadenosine
  modified_base (15)..(15): cm
  modified_base (16)..(16): 2'-deoxy-2'-fluorocytidine
  modified_base (17)..(17): um
  modified_base (18)..(18): 2'-deoxy-2'-fluoroadenosine
  modified_base (19)..(19): 2'-O-methyladenosine
  modified_base (20)..(20): 2'-deoxy-2'-fluorouridine
  modified_base (21)..(21): um
guucauccaaggaaccuaauu

SEQ ID NO: 6085 - RNA, 21 nt, Artificial Sequence
  siRNA sense strand against b2GPI
  modified_base (1)..(1): 2'-deoxy-2'-fluorouridine
  modified_base (2)..(2): um
  misc_feature (2)..(3): 5'-phosphonothioate
  modified_base (3)..(3): 2'-deoxy-2'-fluorocytidine
  modified_base (4)..(4): 2'-O-methyladenosine
  modified_base (5)..(5): 2'-deoxy-2'-fluorouridine
  modified_base (6)..(6): cm
  modified_base (7)..(7): 2'-deoxy-2'-fluorocytidine
  modified_base (8)..(8): 2'-O-methyladenosine
  modified_base (9)..(9): 2'-deoxy-2'-fluoroadenosine
  modified_base (10)..(10): gm
  modified_base (11)..(11): 2'-deoxy-2'-fluoroguanosine
  modified_base (12)..(12): 2'-deoxy-2'-fluoroadenosine
  modified_base (13)..(13): 2'-O-methyladenosine
  modified_base (14)..(14): 2'-deoxy-2'-fluorocytidine
  modified_base (15)..(15): cm
  modified_base (16)..(16): 2'-deoxy-2'-fluorouridine
  modified_base (17)..(17): 2'-O-methyladenosine
  modified_base (18)..(18): 2'-deoxy-2'-fluoroadenosine
  modified_base (19)..(19): um
  modified_base (20)..(20): 2'-deoxy-2'-fluorouridine
  modified_base (21)..(21): gm
uucauccaaggaaccuaauug

SEQ ID NO: 6086 - RNA, 21 nt, Artificial Sequence
  siRNA sense strand against b2GPI
  modified_base (1)..(1): 2'-deoxy-2'-fluorouridine
  modified_base (2)..(2): cm
  misc_feature (2)..(3): 5'-phosphonothioate
  modified_base (3)..(3): 2'-deoxy-2'-fluoroadenosine
  modified_base (4)..(4): um
  modified_base (5)..(5): 2'-deoxy-2'-fluorocytidine
  modified_base (6)..(6): cm
  modified_base (7)..(7): 2'-deoxy-2'-fluoroadenosine
  modified_base (8)..(8): 2'-O-methyladenosine
  modified_base (9)..(9): 2'-deoxy-2'-fluoroguanosine
  modified_base (10)..(10): gm
  modified_base (11)..(11): 2'-deoxy-2'-fluoroadenosine
  modified_base (12)..(12): 2'-deoxy-2'-fluoroadenosine
  modified_base (13)..(13): cm
  modified_base (14)..(14): 2'-deoxy-2'-fluorocytidine
  modified_base (15)..(15): um
  modified_base (16)..(16): 2'-deoxy-2'-fluoroadenosine
  modified_base (17)..(17): 2'-O-methyladenosine
  modified_base (18)..(18): 2'-deoxy-2'-fluorouridine
  modified_base (19)..(19): um
  modified_base (20)..(20): 2'-deoxy-2'-fluoroguanosine
  modified_base (21)..(21): 2'-O-methyladenosine
ucauccaaggaaccuaauuga

SEQ ID NO: 6087 - RNA, 21 nt, Artificial Sequence
  siRNA sense strand against b2GPI
  modified_base (1)..(1): 2'-deoxy-2'-fluorocytidine
  modified_base (2)..(2): 2'-O-methyladenosine
  misc_feature (2)..(3): 5'-phosphonothioate
  modified_base (3)..(3): 2'-deoxy-2'-fluorouridine
  modified_base (4)..(4): cm
  modified_base (5)..(5): 2'-deoxy-2'-fluorocytidine
  modified_base (6)..(6): 2'-O-methyladenosine
  modified_base (7)..(7): 2'-deoxy-2'-fluoroadenosine
  modified_base (8)..(8): gm
  modified_base (9)..(9): 2'-deoxy-2'-fluoroguanosine
  modified_base (10)..(10): 2'-O-methyladenosine
  modified_base (11)..(11): 2'-deoxy-2'-fluoroadenosine
  modified_base (12)..(12): 2'-deoxy-2'-fluorocytidine
  modified_base (13)..(13): cm
  modified_base (14)..(14): 2'-deoxy-2'-fluorouridine
  modified_base (15)..(15): 2'-O-methyladenosine
  modified_base (16)..(16): 2'-deoxy-2'-fluoroadenosine
  modified_base (17)..(17): um
  modified_base (18)..(18): 2'-deoxy-2'-fluorouridine
  modified_base (19)..(19): gm
  modified_base (20)..(20): 2'-deoxy-2'-fluoroadenosine
  modified_base (21)..(21): 2'-O-methyladenosine
cauccaaggaaccuaauugaa

SEQ ID NO: 6088 - RNA, 21 nt, Artificial Sequence
  siRNA sense strand against b2GPI
  modified_base (1)..(1): 2'-deoxy-2'-fluoroadenosine
  modified_base (2)..(2): um
  misc_feature (2)..(3): 5'-phosphonothioate
  modified_base (3)..(3): 2'-deoxy-2'-fluorocytidine
  modified_base (4)..(4): cm
  modified_base (5)..(5): 2'-deoxy-2'-fluoroadenosine
  modified_base (6)..(6): 2'-O-methyladenosine
  modified_base (7)..(7): 2'-deoxy-2'-fluoroguanosine
  modified_base (8)..(8): gm
  modified_base (9)..(9): 2'-deoxy-2'-fluoroadenosine
  modified_base (10)..(10): 2'-O-methyladenosine
  modified_base (11)..(11): 2'-deoxy-2'-fluorocytidine
  modified_base (12)..(12): 2'-deoxy-2'-fluorocytidine
  modified_base (13)..(13): um
  modified_base (14)..(14): 2'-deoxy-2'-fluoroadenosine
  modified_base (15)..(15): 2'-O-methyladenosine
  modified_base (16)..(16): 2'-deoxy-2'-fluorouridine
  modified_base (17)..(17): um
  modified_base (18)..(18): 2'-deoxy-2'-fluoroguanosine
  modified_base (19)..(19): 2'-O-methyladenosine
  modified_base (20)..(20): 2'-deoxy-2'-fluoroadenosine
  modified_base (21)..(21): 2'-O-methyladenosine
auccaaggaaccuaauugaaa

SEQ ID NO: 6089 - RNA, 21 nt, Artificial Sequence
  siRNA sense strand against b2GPI
  modified_base (1)..(1): 2'-deoxy-2'-fluorouridine
  modified_base (2)..(2): cm
  misc_feature (2)..(3): 5'-phosphonothioate
  modified_base (3)..(3): 2'-deoxy-2'-fluorocytidine
  modified_base (4)..(4): 2'-O-methyladenosine
  modified_base (5)..(5): 2'-deoxy-2'-fluoroadenosine
  modified_base (6)..(6): gm
  modified_base (7)..(7): 2'-deoxy-2'-fluoroguanosine
  modified_base (8)..(8): 2'-O-methyladenosine
  modified_base (9)..(9): 2'-deoxy-2'-fluoroadenosine
  modified_base (10)..(10): cm
  modified_base (11)..(11): 2'-deoxy-2'-fluorocytidine
  modified_base (12)..(12): 2'-deoxy-2'-fluorouridine
  modified_base (13)..(13): 2'-O-methyladenosine
  modified_base (14)..(14): 2'-deoxy-2'-fluoroadenosine
  modified_base (15)..(15): um
  modified_base (16)..(16): 2'-deoxy-2'-fluorouridine
  modified_base (17)..(17): gm
  modified_base (18)..(18): 2'-deoxy-2'-fluoroadenosine
  modified_base (19)..(19): 2'-O-methyladenosine
  modified_base (20)..(20): 2'-deoxy-2'-fluoroadenosine
  modified_base (21)..(21): um
uccaaggaaccuaauugaaau

SEQ ID NO: 6090 - RNA, 21 nt, Artificial Sequence
  siRNA sense strand against b2GPI
  modified_base (1)..(1): 2'-deoxy-2'-fluorocytidine
  modified_base (2)..(2): cm
  misc_feature (2)..(3): 5'-phosphonothioate
  modified_base (3)..(3): 2'-deoxy-2'-fluoroadenosine
  modified_base (4)..(4): 2'-O-methyladenosine
  modified_base (5)..(5): 2'-deoxy-2'-fluoroguanosine
  modified_base (6)..(6): gm
  modified_base (7)..(7): 2'-deoxy-2'-fluoroadenosine
  modified_base (8)..(8): 2'-O-methyladenosine
  modified_base (9)..(9): 2'-deoxy-2'-fluorocytidine
  modified_base (10)..(10): cm
  modified_base (11)..(11): 2'-deoxy-2'-fluorouridine
  modified_base (12)..(12): 2'-deoxy-2'-fluoroadenosine
  modified_base (13)..(13): 2'-O-methyladenosine
  modified_base (14)..(14): 2'-deoxy-2'-fluorouridine
  modified_base (15)..(15): um
  modified_base (16)..(16): 2'-deoxy-2'-fluoroguanosine
  modified_base (17)..(17): 2'-O-methyladenosine
  modified_base (18)..(18): 2'-deoxy-2'-fluoroadenosine
  modified_base (19)..(19): 2'-O-methyladenosine
  modified_base (20)..(20): 2'-deoxy-2'-fluorouridine
  modified_base (21)..(21): um
ccaaggaaccuaauugaaauu

SEQ ID NO: 6091 - RNA, 21 nt, Artificial Sequence
  siRNA sense strand against b2GPI
  modified_base (1)..(1): 2'-deoxy-2'-fluorocytidine
  modified_base (2)..(2): 2'-O-methyladenosine
  misc_feature (2)..(3): 5'-phosphonothioate
  modified_base (3)..(3): 2'-deoxy-2'-fluoroadenosine
  modified_base (4)..(4): gm
  modified_base (5)..(5): 2'-deoxy-2'-fluoroguanosine
  modified_base (6)..(6): 2'-O-methyladenosine
  modified_base (7)..(7): 2'-deoxy-2'-fluoroadenosine
  modified_base (8)..(8): cm
  modified_base (9)..(9): 2'-deoxy-2'-fluorocytidine
  modified_base (10)..(10): um
  modified_base (11)..(11): 2'-deoxy-2'-fluoroadenosine
  modified_base (12)..(12): 2'-deoxy-2'-fluoroadenosine
  modified_base (13)..(13): um
  modified_base (14)..(14): 2'-deoxy-2'-fluorouridine
  modified_base (15)..(15): gm
  modified_base (16)..(16): 2'-deoxy-2'-fluoroadenosine
  modified_base (17)..(17): 2'-O-methyladenosine
  modified_base (18)..(18): 2'-deoxy-2'-fluoroadenosine
  modified_base (19)..(19): um
  modified_base (20)..(20): 2'-deoxy-2'-fluorouridine
  modified_base (21)..(21): um
caaggaaccuaauugaaauuu

SEQ ID NO: 6092 - RNA, 21 nt, Artificial Sequence
  siRNA sense strand against b2GPI
  modified_base (1)..(1): 2'-deoxy-2'-fluoroadenosine
  modified_base (2)..(2): 2'-O-methyladenosine
  misc_feature (2)..(3): 5'-phosphonothioate
  modified_base (3)..(3): 2'-deoxy-2'-fluoroguanosine
  modified_base (4)..(4): gm
  modified_base (5)..(5): 2'-deoxy-2'-fluoroadenosine
  modified_base (6)..(6): 2'-O-methyladenosine
  modified_base (7)..(7): 2'-deoxy-2'-fluorocytidine
  modified_base (8)..(8): cm
  modified_base (9)..(9): 2'-deoxy-2'-fluorouridine
  modified_base (10)..(10): 2'-O-methyladenosine
  modified_base (11)..(11): 2'-deoxy-2'-fluoroadenosine
  modified_base (12)..(12): 2'-deoxy-2'-fluorouridine
  modified_base (13)..(13): um
  modified_base (14)..(14): 2'-deoxy-2'-fluoroguanosine
  modified_base (15)..(15): 2'-O-methyladenosine
  modified_base (16)..(16): 2'-deoxy-2'-fluoroadenosine
  modified_base (17)..(17): 2'-O-methyladenosine
  modified_base (18)..(18): 2'-deoxy-2'-fluorouridine
  modified_base (19)..(19): um
  modified_base (20)..(20): 2'-deoxy-2'-fluorouridine
  modified_base (21)..(21): 2'-O-methyladenosine
aaggaaccuaauugaaauuua

SEQ ID NO: 6093 - RNA, 21 nt, Artificial Sequence
  siRNA sense strand against b2GPI
  modified_base (1)..(1): 2'-deoxy-2'-fluoroadenosine
  modified_base (2)..(2): gm
  misc_feature (2)..(3): 5'-phosphonothioate
  modified_base (3)..(3): 2'-deoxy-2'-fluoroguanosine
  modified_base (4)..(4): 2'-O-methyladenosine
  modified_base (5)..(5): 2'-deoxy-2'-fluoroadenosine
  modified_base (6)..(6): cm
  modified_base (7)..(7): 2'-deoxy-2'-fluorocytidine
  modified_base (8)..(8): um
  modified_base (9)..(9): 2'-deoxy-2'-fluoroadenosine
  modified_base (10)..(10): 2'-O-methyladenosine
  modified_base (11)..(11): 2'-deoxy-2'-fluorouridine
  modified_base (12)..(12): 2'-deoxy-2'-fluorouridine
  modified_base (13)..(13): gm
  modified_base (14)..(14): 2'-deoxy-2'-fluoroadenosine
  modified_base (15)..(15): 2'-O-methyladenosine
  modified_base (16)..(16): 2'-deoxy-2'-fluoroadenosine
  modified_base (17)..(17): um
  modified_base (18)..(18): 2'-deoxy-2'-fluorouridine
  modified_base (19)..(19): um
  modified_base (20)..(20): 2'-deoxy-2'-fluoroadenosine
  modified_base (21)..(21): 2'-O-methyladenosine
aggaaccuaauugaaauuuaa

SEQ ID NO: 6094 - RNA, 21 nt, Artificial Sequence
  siRNA sense strand against b2GPI
  modified_base (1)..(1): 2'-deoxy-2'-fluoroguanosine
  modified_base (2)..(2): gm
  misc_feature (2)..(3): 5'-phosphonothioate
  modified_base (3)..(3): 2'-deoxy-2'-fluoroadenosine
  modified_base (4)..(4): 2'-O-methyladenosine
  modified_base (5)..(5): 2'-deoxy-2'-fluorocytidine
  modified_base (6)..(6): cm
  modified_base (7)..(7): 2'-deoxy-2'-fluorouridine
  modified_base (8)..(8): 2'-O-methyladenosine
  modified_base (9)..(9): 2'-deoxy-2'-fluoroadenosine
  modified_base (10)..(10): um
  modified_base (11)..(11): 2'-deoxy-2'-fluorouridine
  modified_base (12)..(12): 2'-deoxy-2'-fluoroguanosine
  modified_base (13)..(13): 2'-O-methyladenosine
  modified_base (14)..(14): 2'-deoxy-2'-fluoroadenosine
  modified_base (15)..(15): 2'-O-methyladenosine
  modified_base (16)..(16): 2'-deoxy-2'-fluorouridine
  modified_base (17)..(17): um
  modified_base (18)..(18): 2'-deoxy-2'-fluorouridine
  modified_base (19)..(19): 2'-O-methyladenosine
  modified_base (20)..(20): 2'-deoxy-2'-fluoroadenosine
  modified_base (21)..(21): 2'-O-methyladenosine
ggaaccuaauugaaauuuaaa

SEQ ID NO: 6095 - RNA, 21 nt, Artificial Sequence
  siRNA sense strand against b2GPI
  modified_base (1)..(1): 2'-deoxy-2'-fluoroguanosine
  modified_base (2)..(2): 2'-O-methyladenosine
  misc_feature (2)..(3): 5'-phosphonothioate
  modified_base (3)..(3): 2'-deoxy-2'-fluoroadenosine
  modified_base (4)..(4): cm
  modified_base (5)..(5): 2'-deoxy-2'-fluorocytidine
  modified_base (6)..(6): um
  modified_base (7)..(7): 2'-deoxy-2'-fluoroadenosine
  modified_base (8)..(8): 2'-O-methyladenosine
  modified_base (9)..(9): 2'-deoxy-2'-fluorouridine
  modified_base (10)..(10): um
  modified_base (11)..(11): 2'-deoxy-2'-fluoroguanosine
  modified_base (12)..(12): 2'-deoxy-2'-fluoroadenosine
  modified_base (13)..(13): 2'-O-methyladenosine
  modified_base (14)..(14): 2'-deoxy-2'-fluoroadenosine
  modified_base (15)..(15): um
  modified_base (16)..(16): 2'-deoxy-2'-fluorouridine
  modified_base (17)..(17): um
  modified_base (18)..(18): 2'-deoxy-2'-fluoroadenosine
  modified_base (19)..(19): 2'-O-methyladenosine
  modified_base (20)..(20): 2'-deoxy-2'-fluoroadenosine
  modified_base (21)..(21): 2'-O-methyladenosine
gaaccuaauugaaauuuaaaa

SEQ ID NO: 6096 - RNA, 21 nt, Artificial Sequence
  siRNA sense strand against b2GPI
  modified_base (1)..(1): 2'-deoxy-2'-fluorocytidine
  modified_base (2)..(2): um
  misc_feature (2)..(3): 5'-phosphonothioate
  modified_base (3)..(3): 2'-deoxy-2'-fluoroadenosine
  modified_base (4)..(4): 2'-O-methyladenosine
  modified_base (5)..(5): 2'-deoxy-2'-fluorouridine
  modified_base (6)..(6): um
  modified_base (7)..(7): 2'-deoxy-2'-fluoroguanosine
  modified_base (8)..(8): 2'-O-methyladenosine
  modified_base (9)..(9): 2'-deoxy-2'-fluoroadenosine
  modified_base (10)..(10): 2'-O-methyladenosine
  modified_base (11)..(11): 2'-deoxy-2'-fluorouridine
  modified_base (12)..(12): 2'-deoxy-2'-fluorouridine
  modified_base (13)..(13): um
  modified_base (14)..(14): 2'-deoxy-2'-fluoroadenosine
  modified_base (15)..(15): 2'-O-methyladenosine
  modified_base (16)..(16): 2'-deoxy-2'-fluoroadenosine
  modified_base (17)..(17): 2'-O-methyladenosine
  modified_base (18)..(18): 2'-deoxy-2'-fluoroadenosine
  modified_base (19)..(19): um
  modified_base (20)..(20): 2'-deoxy-2'-fluoroadenosine
  modified_base (21)..(21): 2'-O-methyladenosine
cuaauugaaauuuaaaaauaa

SEQ ID NO: 6097 - RNA, 21 nt, Artificial Sequence
  siRNA sense strand against b2GPI
  modified_base (1)..(1): 2'-deoxy-2'-fluorouridine
  modified_base (2)..(2): 2'-O-methyladenosine
  misc_feature (2)..(3): 5'-phosphonothioate
  modified_base (3)..(3): 2'-deoxy-2'-fluoroadenosine
  modified_base (4)..(4): 2'-O-methyladenosine
  modified_base (5)..(5): 2'-deoxy-2'-fluoroadenosine
  modified_base (6)..(6): 2'-O-methyladenosine
  modified_base (7)..(7): 2'-deoxy-2'-fluorouridine
  modified_base (8)..(8): 2'-O-methyladenosine
  modified_base (9)..(9): 2'-deoxy-2'-fluoroadenosine
  modified_base (10)..(10): 2'-O-methyladenosine
  modified_base (11)..(11): 2'-deoxy-2'-fluoroguanosine
  modified_base (12)..(12): 2'-deoxy-2'-fluorocytidine
  modified_base (13)..(13): um
  modified_base (14)..(14): 2'-deoxy-2'-fluoroadenosine
  modified_base (15)..(15): cm
  modified_base (16)..(16): 2'-deoxy-2'-fluorouridine
  modified_base (17)..(17): gm
  modified_base (18)..(18): 2'-deoxy-2'-fluoroadenosine
  modified_base (19)..(19): 2'-O-methyladenosine
  modified_base (20)..(20): 2'-deoxy-2'-fluorouridine
  modified_base (21)..(21): um
uaaaaauaaagcuacugaauu

SEQ ID NO: 6098 - RNA, 21 nt, Artificial Sequence
  siRNA sense strand against b2GPI
  modified_base (1)..(1): 2'-deoxy-2'-fluoroadenosine
  modified_base (2)..(2): 2'-O-methyladenosine
  misc_feature (2)..(3): 5'-phosphonothioate
  modified_base (3)..(3): 2'-deoxy-2'-fluoroadenosine
  modified_base (4)..(4): 2'-O-methyladenosine
  modified_base (5)..(5): 2'-deoxy-2'-fluoroadenosine
  modified_base (6)..(6): um
  modified_base (7)..(7): 2'-deoxy-2'-fluoroadenosine
  modified_base (8)..(8): 2'-O-methyladenosine
  modified_base (9)..(9): 2'-deoxy-2'-fluoroadenosine
  modified_base (10)..(10): gm
  modified_base (11)..(11): 2'-deoxy-2'-fluorocytidine
  modified_base (12)..(12): 2'-deoxy-2'-fluorouridine
  modified_base (13)..(13): 2'-O-methyladenosine
  modified_base (14)..(14): 2'-deoxy-2'-fluorocytidine
  modified_base (15)..(15): um
  modified_base (16)..(16): 2'-deoxy-2'-fluoroguanosine
  modified_base (17)..(17): 2'-O-methyladenosine
  modified_base (18)..(18): 2'-deoxy-2'-fluoroadenosine
  modified_base (19)..(19): um
  modified_base (20)..(20): 2'-deoxy-2'-fluorouridine
  modified_base (21)..(21): um
aaaaauaaagcuacugaauuu

SEQ ID NO: 6099 - RNA, 21 nt, Artificial Sequence
  siRNA sense strand against b2GPI
  modified_base (1)..(1): 2'-deoxy-2'-fluoroadenosine
  modified_base (2)..(2): 2'-O-methyladenosine
  misc_feature (2)..(3): 5'-phosphonothioate
  modified_base (3)..(3): 2'-deoxy-2'-fluoroadenosine
  modified_base (4)..(4): 2'-O-methyladenosine
  modified_base (5)..(5): 2'-deoxy-2'-fluorouridine
  modified_base (6)..(6): 2'-O-methyladenosine
  modified_base (7)..(7): 2'-deoxy-2'-fluoroadenosine
  modified_base (8)..(8): 2'-O-methyladenosine
  modified_base (9)..(9): 2'-deoxy-2'-fluoroguanosine
  modified_base (10)..(10): cm
  modified_base (11)..(11): 2'-deoxy-2'-fluorouridine
  modified_base (12)..(12): 2'-deoxy-2'-fluoroadenosine
  modified_base (13)..(13): cm
  modified_base (14)..(14): 2'-deoxy-2'-fluorouridine
  modified_base (15)..(15): gm
  modified_base (16)..(16): 2'-deoxy-2'-fluoroadenosine
  modified_base (17)..(17): 2'-O-methyladenosine
  modified_base (18)..(18): 2'-deoxy-2'-fluorouridine
  modified_base (19)..(19): um
  modified_base (20)..(20): 2'-deoxy-2'-fluorouridine
  modified_base (21)..(21): 2'-O-methyladenosine
aaaauaaagcuacugaauuua

SEQ ID NO: 6100 - RNA, 21 nt, Artificial Sequence
  siRNA sense strand against b2GPI
  modified_base (1)..(1): 2'-deoxy-2'-fluoroadenosine
  modified_base (2)..(2): 2'-O-methyladenosine
  misc_feature (2)..(3): 5'-phosphonothioate
  modified_base (3)..(3): 2'-deoxy-2'-fluorouridine
  modified_base (4)..(4): 2'-O-methyladenosine
  modified_base (5)..(5): 2'-deoxy-2'-fluoroadenosine
  modified_base (6)..(6): 2'-O-methyladenosine
  modified_base (7)..(7): 2'-deoxy-2'-fluoroguanosine
  modified_base (8)..(8): cm
  modified_base (9)..(9): 2'-deoxy-2'-fluorouridine
  modified_base (10)..(10): 2'-O-methyladenosine
  modified_base (11)..(11): 2'-deoxy-2'-fluorocytidine
  modified_base (12)..(12): 2'-deoxy-2'-fluorouridine
  modified_base (13)..(13): gm
  modified_base (14)..(14): 2'-deoxy-2'-fluoroadenosine
  modified_base (15)..(15): 2'-O-methyladenosine
  modified_base (16)..(16): 2'-deoxy-2'-fluorouridine
  modified_base (17)..(17): um
  modified_base (18)..(18): 2'-deoxy-2'-fluorouridine
  modified_base (19)..(19): 2'-O-methyladenosine
  modified_base (20)..(20): 2'-deoxy-2'-fluorouridine
  modified_base (21)..(21): um
aauaaagcuacugaauuuauu

SEQ ID NO: 6101 - RNA, 21 nt, Artificial Sequence
  siRNA sense strand against b2GPI
  modified_base (1)..(1): 2'-deoxy-2'-fluoroadenosine
  modified_base (2)..(2): 2'-O-methyladenosine
  misc_feature (2)..(3): 5'-phosphonothioate
  modified_base (3)..(3): 2'-deoxy-2'-fluoroguanosine
  modified_base (4)..(4): cm
  modified_base (5)..(5): 2'-deoxy-2'-fluorouridine
  modified_base (6)..(6): 2'-O-methyladenosine
  modified_base (7)..(7): 2'-deoxy-2'-fluorocytidine
  modified_base (8)..(8): um
  modified_base (9)..(9): 2'-deoxy-2'-fluoroguanosine
  modified_base (10)..(10): 2'-O-methyladenosine
  modified_base (11)..(11): 2'-deoxy-2'-fluoroadenosine
  modified_base (12)..(12): 2'-deoxy-2'-fluorouridine
  modified_base (13)..(13): um
  modified_base (14)..(14): 2'-deoxy-2'-fluorouridine
  modified_base (15)..(15): 2'-O-methyladenosine
  modified_base (16)..(16): 2'-deoxy-2'-fluorouridine
  modified_base (17)..(17): um
  modified_base (18)..(18): 2'-deoxy-2'-fluoroguanosine
  modified_base (19)..(19): cm
  modified_base (20)..(20): 2'-deoxy-2'-fluorocytidine
  modified_base (21)..(21): gm
aagcuacugaauuuauugccg

SEQ ID NO: 6102 - RNA, 21 nt, Artificial Sequence
  siRNA sense strand against b2GPI
  modified_base (1)..(1): 2'-deoxy-2'-fluoroadenosine
  modified_base (2)..(2): gm
  misc_feature (2)..(3): 5'-phosphonothioate
  modified_base (3)..(3): 2'-deoxy-2'-fluorocytidine
  modified_base (4)..(4): um
  modified_base (5)..(5): 2'-deoxy-2'-fluoroadenosine
  modified_base (6)..(6): cm
  modified_base (7)..(7): 2'-deoxy-2'-fluorouridine
  modified_base (8)..(8): gm
  modified_base (9)..(9): 2'-deoxy-2'-fluoroadenosine
  modified_base (10)..(10): 2'-O-methyladenosine
  modified_base (11)..(11): 2'-deoxy-2'-fluorouridine
  modified_base (12)..(12): 2'-deoxy-2'-fluorouridine
  modified_base (13)..(13): um
  modified_base (14)..(14): 2'-deoxy-2'-fluoroadenosine
  modified_base (15)..(15): um
  modified_base (16)..(16): 2'-deoxy-2'-fluorouridine
  modified_base (17)..(17): gm
  modified_base (18)..(18): 2'-deoxy-2'-fluorocytidine
  modified_base (19)..(19): cm
  modified_base (20)..(20): 2'-deoxy-2'-fluoroguanosine
  modified_base (21)..(21): cm
agcuacugaauuuauugccgc

SEQ ID NO: 6103 - RNA, 21 nt, Artificial Sequence
  siRNA sense strand against b2GPI
  modified_base (1)..(1): 2'-deoxy-2'-fluoroguanosine
  modified_base (2)..(2): cm
  misc_feature (2)..(3): 5'-phosphonothioate
  modified_base (3)..(3): 2'-deoxy-2'-fluorouridine
  modified_base (4)..(4): 2'-O-methyladenosine
  modified_base (5)..(5): 2'-deoxy-2'-fluorocytidine
  modified_base (6)..(6): um
  modified_base (7)..(7): 2'-deoxy-2'-fluoroguanosine
  modified_base (8)..(8): 2'-O-methyladenosine
  modified_base (9)..(9): 2'-deoxy-2'-fluoroadenosine
  modified_base (10)..(10): um
  modified_base (11)..(11): 2'-deoxy-2'-fluorouridine
  modified_base (12)..(12): 2'-deoxy-2'-fluorouridine
  modified_base (13)..(13): 2'-O-methyladenosine
  modified_base (14)..(14): 2'-deoxy-2'-fluorouridine
  modified_base (15)..(15): um
  modified_base (16)..(16): 2'-deoxy-2'-fluoroguanosine
  modified_base (17)..(17): cm
  modified_base (18)..(18): 2'-deoxy-2'-fluorocytidine
  modified_base (19)..(19): gm
  modified_base (20)..(20): 2'-deoxy-2'-fluorocytidine
  modified_base (21)..(21): 2'-O-methyladenosine
gcuacugaauuuauugccgca

SEQ ID NO: 6104 - RNA, 21 nt, Artificial Sequence
  siRNA sense strand against b2GPI
  modified_base (1)..(1): 2'-deoxy-2'-fluorocytidine
  modified_base (2)..(2): um
  misc_feature (2)..(3): 5'-phosphonothioate
  modified_base (3)..(3): 2'-deoxy-2'-fluoroadenosine
  modified_base (4)..(4): cm
  modified_base (5)..(5): 2'-deoxy-2'-fluorouridine
  modified_base (6)..(6): gm
  modified_base (7)..(7): 2'-deoxy-2'-fluoroadenosine
  modified_base (8)..(8): 2'-O-methyladenosine
  modified_base (9)..(9): 2'-deoxy-2'-fluorouridine
  modified_base (10)..(10): um
  modified_base (11)..(11): 2'-deoxy-2'-fluorouridine
  modified_base (12)..(12): 2'-deoxy-2'-fluoroadenosine
  modified_base (13)..(13): um
  modified_base (14)..(14): 2'-deoxy-2'-fluorouridine
  modified_base (15)..(15): gm
  modified_base (16)..(16): 2'-deoxy-2'-fluorocytidine
  modified_base (17)..(17): cm
  modified_base (18)..(18): 2'-deoxy-2'-fluoroguanosine
  modified_base (19)..(19): cm
  modified_base (20)..(20): 2'-deoxy-2'-fluoroadenosine
  modified_base (21)..(21): cm
cuacugaauuuauugccgcac

SEQ ID NO: 6105 - RNA, 21 nt, Artificial Sequence
  siRNA sense strand against b2GPI
  modified_base (1)..(1): 2'-deoxy-2'-fluorocytidine
  modified_base (2)..(2): um
  misc_feature (2)..(3): 5'-phosphonothioate
  modified_base (3)..(3): 2'-deoxy-2'-fluorocytidine
  modified_base (4)..(4): um
  modified_base (5)..(5): 2'-deoxy-2'-fluoroguanosine
  modified_base (6)..(6): cm
  modified_base (7)..(7): 2'-deoxy-2'-fluorocytidine
  modified_base (8)..(8): 2'-O-methyladenosine
  modified_base (9)..(9): 2'-deoxy-2'-fluorouridine
  modified_base (10)..(10): gm
  modified_base (11)..(11): 2'-deoxy-2'-fluorouridine
  modified_base (12)..(12): 2'-deoxy-2'-fluorouridine
  modified_base (13)..(13): gm
  modified_base (14)..(14): 2'-deoxy-2'-fluorocytidine
  modified_base (15)..(15): um
  modified_base (16)..(16): 2'-deoxy-2'-fluoroadenosine
  modified_base (17)..(17): um
  modified_base (18)..(18): 2'-deoxy-2'-fluorouridine
  modified_base (19)..(19): gm
  modified_base (20)..(20): 2'-deoxy-2'-fluorocytidine
  modified_base (21)..(21): 2'-O-methyladenosine
cucugccauguugcuauugca

SEQ ID NO: 6106 - RNA, 21 nt, Artificial Sequence
  siRNA sense strand against b2GPI
  modified_base (1)..(1): 2'-deoxy-2'-fluoroguanosine
  modified_base (2)..(2): cm
  misc_feature (2)..(3): 5'-phosphonothioate
  modified_base (3)..(3): 2'-deoxy-2'-fluorouridine
  modified_base (4)..(4): gm
  modified_base (5)..(5): 2'-deoxy-2'-fluoroguanosine
  modified_base (6)..(6): 2'-O-methyladenosine
  modified_base (7)..(7): 2'-deoxy-2'-fluoroadenosine
  modified_base (8)..(8): um
  modified_base (9)..(9): 2'-deoxy-2'-fluorocytidine
  modified_base (10)..(10): um
  modified_base (11)..(11): 2'-deoxy-2'-fluorouridine
  modified_base (12)..(12): 2'-deoxy-2'-fluoroadenosine
  modified_base (13)..(13): gm
  modified_base (14)..(14): 2'-deoxy-2'-fluoroadenosine
  modified_base (15)..(15): 2'-O-methyladenosine
  modified_base (16)..(16): 2'-deoxy-2'-fluoroadenosine
  modified_base (17)..(17): 2'-O-methyladenosine
  modified_base (18)..(18): 2'-deoxy-2'-fluorouridine
  modified_base (19)..(19): gm
  modified_base (20)..(20): 2'-deoxy-2'-fluoroguanosine
  modified_base (21)..(21): 2'-O-methyladenosine
gcuggaaucuuagaaaaugga

SEQ ID NO: 6107 - RNA, 23 nt, Artificial Sequence
  siRNA antisense strand against b2GPI
  modified_base (1)..(1): 2'-deoxy-2'-fluorouridine
  modified_base (2)..(2): gm
  misc_feature (2)..(3): 5'-phosphonothioate
  modified_base (3)..(3): 2'-deoxy-2'-fluoroadenosine
  modified_base (4)..(4): gm
  modified_base (5)..(5): 2'-deoxy-2'-fluorouridine
  modified_base (6)..(6): cm
  modified_base (7)..(7): 2'-deoxy-2'-fluoroadenosine
  modified_base (8)..(8): cm
  modified_base (9)..(9): 2'-deoxy-2'-fluoroadenosine
  modified_base (10)..(10): cm
  modified_base (11)..(11): um
  modified_base (12)..(12): 2'-deoxy-2'-fluoroguanosine
  modified_base (13)..(13): gm
  modified_base (14)..(14): 2'-deoxy-2'-fluorocytidine
  modified_base (15)..(15): 2'-O-methyladenosine
  modified_base (16)..(16): 2'-deoxy-2'-fluorocytidine
  modified_base (17)..(17): um
  modified_base (18)..(18): 2'-deoxy-2'-fluoroadenosine
  modified_base (19)..(19): cm
  modified_base (20)..(20): 2'-deoxy-2'-fluorocytidine
  modified_base (21)..(21): 2'-O-methyladenosine
  modified_base (22)..(22): 2'-deoxy-2'-fluoroadenosine
  misc_feature (22)..(23): 5'-phosphonothioate
  modified_base (23)..(23): 2'-O-methyladenosine
ugagucacacuggcacuaccaaa

SEQ ID NO: 6108 - RNA, 23 nt, Artificial Sequence
  siRNA antisense strand against b2GPI
  modified_base (1)..(1): 2'-deoxy-2'-fluoroadenosine
  modified_base (2)..(2): um
  misc_feature (2)..(3): 5'-phosphonothioate
  modified_base (3)..(3): 2'-deoxy-2'-fluoroguanosine
  modified_base (4)..(4): 2'-O-methyladenosine
  modified_base (5)..(5): 2'-deoxy-2'-fluoroguanosine
  modified_base (6)..(6): um
  modified_base (7)..(7): 2'-deoxy-2'-fluorocytidine
  modified_base (8)..(8): 2'-O-methyladenosine
  modified_base (9)..(9): 2'-deoxy-2'-fluorocytidine
  modified_base (10)..(10): 2'-O-methyladenosine
  modified_base (11)..(11): cm
  modified_base (12)..(12): 2'-deoxy-2'-fluorouridine
  modified_base (13)..(13): gm
  modified_base (14)..(14): 2'-deoxy-2'-fluoroguanosine
  modified_base (15)..(15): cm
  modified_base (16)..(16): 2'-deoxy-2'-fluoroadenosine
  modified_base (17)..(17): cm
  modified_base (18)..(18): 2'-deoxy-2'-fluorouridine
  modified_base (19)..(19): 2'-O-methyladenosine
  modified_base (20)..(20): 2'-deoxy-2'-fluorocytidine
  modified_base (21)..(21): cm
  modified_base (22)..(22): 2'-deoxy-2'-fluoroadenosine
  misc_feature (22)..(23): 5'-phosphonothioate
  modified_base (23)..(23): 2'-O-methyladenosine
augagucacacuggcacuaccaa

SEQ ID NO: 6109 - RNA, 23 nt, Artificial Sequence
  siRNA antisense strand against b2GPI
  modified_base (1)..(1): 2'-deoxy-2'-fluoroguanosine
  modified_base (2)..(2): 2'-O-methyladenosine
  misc_feature (2)..(3): 5'-phosphonothioate
  modified_base (3)..(3): 2'-deoxy-2'-fluorouridine
  modified_base (4)..(4): gm
  modified_base (5)..(5): 2'-deoxy-2'-fluoroadenosine
  modified_base (6)..(6): gm
  modified_base (7)..(7): 2'-deoxy-2'-fluorouridine
  modified_base (8)..(8): cm
  modified_base (9)..(9): 2'-deoxy-2'-fluoroadenosine
  modified_base (10)..(10): cm
  modified_base (11)..(11): 2'-O-methyladenosine
  modified_base (12)..(12): 2'-deoxy-2'-fluorocytidine
  modified_base (13)..(13): um
  modified_base (14)..(14): 2'-deoxy-2'-fluoroguanosine
  modified_base (15)..(15): gm
  modified_base (16)..(16): 2'-deoxy-2'-fluorocytidine
  modified_base (17)..(17): 2'-O-methyladenosine
  modified_base (18)..(18): 2'-deoxy-2'-fluorocytidine
  modified_base (19)..(19): um
  modified_base (20)..(20): 2'-deoxy-2'-fluoroadenosine
  modified_base (21)..(21): cm
  modified_base (22)..(22): 2'-deoxy-2'-fluorocytidine
  misc_feature (22)..(23): 5'-phosphonothioate
  modified_base (23)..(23): 2'-O-methyladenosine
gaugagucacacuggcacuacca

SEQ ID NO: 6110 - RNA, 23 nt, Artificial Sequence
  siRNA antisense strand against b2GPI
  modified_base (1)..(1): 2'-deoxy-2'-fluoroguanosine
  modified_base (2)..(2): gm
  misc_feature (2)..(3): 5'-phosphonothioate
  modified_base (3)..(3): 2'-deoxy-2'-fluoroadenosine
  modified_base (4)..(4): um
  modified_base (5)..(5): 2'-deoxy-2'-fluoroguanosine
  modified_base (6)..(6): 2'-O-methyladenosine
  modified_base (7)..(7): 2'-deoxy-2'-fluoroguanosine
  modified_base (8)..(8): um
  modified_base (9)..(9): 2'-deoxy-2'-fluorocytidine
  modified_base (10)..(10): 2'-O-methyladenosine
  modified_base (11)..(11): cm
  modified_base (12)..(12): 2'-deoxy-2'-fluoroadenosine
  modified_base (13)..(13): cm
  modified_base (14)..(14): 2'-deoxy-2'-fluorouridine
  modified_base (15)..(15): gm
  modified_base (16)..(16): 2'-deoxy-2'-fluoroguanosine
  modified_base (17)..(17): cm
  modified_base (18)..(18): 2'-deoxy-2'-fluoroadenosine
  modified_base (19)..(19): cm
  modified_base (20)..(20): 2'-deoxy-2'-fluorouridine
  modified_base (21)..(21): 2'-O-methyladenosine
  modified_base (22)..(22): 2'-deoxy-2'-fluorocytidine
  misc_feature (22)..(23): 5'-phosphonothioate
  modified_base (23)..(23): cm
ggaugagucacacuggcacuacc

SEQ ID NO: 6111 - RNA, 23 nt, Artificial Sequence
  siRNA antisense strand against b2GPI
  modified_base (1)..(1): 2'-deoxy-2'-fluorouridine
  modified_base (2)..(2): gm
  misc_feature (2)..(3): 5'-phosphonothioate
  modified_base (3)..(3): 2'-deoxy-2'-fluoroguanosine
  modified_base (4)..(4): 2'-O-methyladenosine
  modified_base (5)..(5): 2'-deoxy-2'-fluorouridine
  modified_base (6)..(6): gm
  modified_base (7)..(7): 2'-deoxy-2'-fluoroadenosine
  modified_base (8)..(8): gm
  modified_base (9)..(9): 2'-deoxy-2'-fluorouridine
  modified_base (10)..(10): cm
  modified_base (11)..(11): 2'-O-methyladenosine
  modified_base (12)..(12): 2'-deoxy-2'-fluorocytidine
  modified_base (13)..(13): 2'-O-methyladenosine
  modified_base (14)..(14): 2'-deoxy-2'-fluorocytidine
  modified_base (15)..(15): um
  modified_base (16)..(16): 2'-deoxy-2'-fluoroguanosine
  modified_base (17)..(17): gm
  modified_base (18)..(18): 2'-deoxy-2'-fluorocytidine
  modified_base (19)..(19): 2'-O-methyladenosine
  modified_base (20)..(20): 2'-deoxy-2'-fluorocytidine
  modified_base (21)..(21): um
  modified_base (22)..(22): 2'-deoxy-2'-fluoroadenosine
  misc_feature (22)..(23): 5'-phosphonothioate
  modified_base (23)..(23): cm
uggaugagucacacuggcacuac

SEQ ID NO: 6112 - RNA, 23 nt, Artificial Sequence
  siRNA antisense strand against b2GPI
  modified_base (1)..(1): 2'-deoxy-2'-fluoroguanosine
  modified_base (2)..(2): um
  misc_feature (2)..(3): 5'-phosphonothioate
  modified_base (3)..(3): 2'-deoxy-2'-fluoroguanosine
  modified_base (4)..(4): gm
  modified_base (5)..(5): 2'-deoxy-2'-fluoroadenosine
  modified_base (6)..(6): um
  modified_base (7)..(7): 2'-deoxy-2'-fluoroguanosine
  modified_base (8)..(8): 2'-O-methyladenosine
  modified_base (9)..(9): 2'-deoxy-2'-fluoroguanosine
  modified_base (10)..(10): um
  modified_base (11)..(11): cm
  modified_base (12)..(12): 2'-deoxy-2'-fluoroadenosine
  modified_base (13)..(13): cm
  modified_base (14)..(14): 2'-deoxy-2'-fluoroadenosine
  modified_base (15)..(15): cm
  modified_base (16)..(16): 2'-deoxy-2'-fluorouridine
  modified_base (17)..(17): gm
  modified_base (18)..(18): 2'-deoxy-2'-fluoroguanosine
  modified_base (19)..(19): cm
  modified_base (20)..(20): 2'-deoxy-2'-fluoroadenosine
  modified_base (21)..(21): cm
  modified_base (22)..(22): 2'-deoxy-2'-fluorouridine
  misc_feature (22)..(23): 5'-phosphonothioate
  modified_base (23)..(23): 2'-O-methyladenosine
guggaugagucacacuggcacua

SEQ ID NO: 6113 - RNA, 23 nt, Artificial Sequence
  siRNA antisense strand against b2GPI
  modified_base (1)..(1): 2'-deoxy-2'-fluorouridine
  modified_base (2)..(2): gm
  misc_feature (2)..(3): 5'-phosphonothioate
  modified_base (3)..(3): 2'-deoxy-2'-fluorouridine
  modified_base (4)..(4): gm
  modified_base (5)..(5): 2'-deoxy-2'-fluoroguanosine
  modified_base (6)..(6): 2'-O-methyladenosine
  modified_base (7)..(7): 2'-deoxy-2'-fluorouridine
  modified_base (8)..(8): gm
  modified_base (9)..(9): 2'-deoxy-2'-fluoroadenosine
  modified_base (10)..(10): gm
  modified_base (11)..(11): um
  modified_base (12)..(12): 2'-deoxy-2'-fluorocytidine
  modified_base (13)..(13): 2'-O-methyladenosine
  modified_base (14)..(14): 2'-deoxy-2'-fluorocytidine
  modified_base (15)..(15): 2'-O-methyladenosine
  modified_base (16)..(16): 2'-deoxy-2'-fluorocytidine
  modified_base (17)..(17): um
  modified_base (18)..(18): 2'-deoxy-2'-fluoroguanosine
  modified_base (19)..(19): gm
  modified_base (20)..(20): 2'-deoxy-2'-fluorocytidine
  modified_base (21)..(21): 2'-O-methyladenosine
  modified_base (22)..(22): 2'-deoxy-2'-fluorocytidine
  misc_feature (22)..(23): 5'-phosphonothioate
  modified_base (23)..(23): um
uguggaugagucacacuggcacu

SEQ ID NO: 6114 - RNA, 23 nt, Artificial Sequence
  siRNA antisense strand against b2GPI
  modified_base (1)..(1): 2'-deoxy-2'-fluorouridine
  modified_base (2)..(2): um
  misc_feature (2)..(3): 5'-phosphonothioate
  modified_base (3)..(3): 2'-deoxy-2'-fluoroguanosine
  modified_base (4)..(4): um
  modified_base (5)..(5): 2'-deoxy-2'-fluoroguanosine
  modified_base (6)..(6): gm
  modified_base (7)..(7): 2'-deoxy-2'-fluoroadenosine
  modified_base (8)..(8): um
  modified_base (9)..(9): 2'-deoxy-2'-fluoroguanosine
  modified_base (10)..(10): 2'-O-methyladenosine
  modified_base (11)..(11): gm
  modified_base (12)..(12): 2'-deoxy-2'-fluorouridine
  modified_base (13)..(13): cm
  modified_base (14)..(14): 2'-deoxy-2'-fluoroadenosine
  modified_base (15)..(15): cm
  modified_base (16)..(16): 2'-deoxy-2'-fluoroadenosine
  modified_base (17)..(17): cm
  modified_base (18)..(18): 2'-deoxy-2'-fluorouridine
  modified_base (19)..(19): gm
  modified_base (20)..(20): 2'-deoxy-2'-fluoroguanosine
  modified_base (21)..(21): cm
  modified_base (22)..(22): 2'-deoxy-2'-fluoroadenosine
  misc_feature (22)..(23): 5'-phosphonothioate
  modified_base (23)..(23): cm
uuguggaugagucacacuggcac

SEQ ID NO: 6115 - RNA, 23 nt, Artificial Sequence
  siRNA antisense strand against b2GPI
  modified_base (1)..(1): 2'-deoxy-2'-fluoroadenosine
  modified_base (2)..(2): um
  misc_feature (2)..(3): 5'-phosphonothioate
  modified_base (3)..(3): 2'-deoxy-2'-fluorouridine
  modified_base (4)..(4): gm
  modified_base (5)..(5): 2'-deoxy-2'-fluorouridine
  modified_base (6)..(6): gm
  modified_base (7)..(7): 2'-deoxy-2'-fluoroguanosine
  modified_base (8)..(8): 2'-O-methyladenosine
  modified_base (9)..(9): 2'-deoxy-2'-fluorouridine
  modified_base (10)..(10): gm
  modified_base (11)..(11): 2'-O-methyladenosine
  modified_base (12)..(12): 2'-deoxy-2'-fluoroguanosine
  modified_base (13)..(13): um
  modified_base (14)..(14): 2'-deoxy-2'-fluorocytidine
  modified_base (15)..(15): 2'-O-methyladenosine
  modified_base (16)..(16): 2'-deoxy-2'-fluorocytidine
  modified_base (17)..(17): 2'-O-methyladenosine
  modified_base (18)..(18): 2'-deoxy-2'-fluorocytidine
  modified_base (19)..(19): um
  modified_base (20)..(20): 2'-deoxy-2'-fluoroguanosine
  modified_base (21)..(21): gm
  modified_base (22)..(22): 2'-deoxy-2'-fluorocytidine
  misc_feature (22)..(23): 5'-phosphonothioate
  modified_base (23)..(23): 2'-O-methyladenosine
auuguggaugagucacacuggca

SEQ ID NO: 6116 - RNA, 23 nt, Artificial Sequence
  siRNA antisense strand against b2GPI
  modified_base (1)..(1): 2'-deoxy-2'-fluorocytidine
  modified_base (2)..(2): 2'-O-methyladenosine
  misc_feature (2)..(3): 5'-phosphonothioate
  modified_base (3)..(3): 2'-deoxy-2'-fluorouridine
  modified_base (4)..(4): um
  modified_base (5)..(5): 2'-deoxy-2'-fluoroguanosine
  modified_base (6)..(6): um
  modified_base (7)..(7): 2'-deoxy-2'-fluoroguanosine
  modified_base (8)..(8): gm
  modified_base (9)..(9): 2'-deoxy-2'-fluoroadenosine
  modified_base (10)..(10): um
  modified_base (11)..(11): gm
  modified_base (12)..(12): 2'-deoxy-2'-fluoroadenosine
  modified_base (13)..(13): gm
  modified_base (14)..(14): 2'-deoxy-2'-fluorouridine
  modified_base (15)..(15): cm
  modified_base (16)..(16): 2'-deoxy-2'-fluoroadenosine
  modified_base (17)..(17): cm
  modified_base (18)..(18): 2'-deoxy-2'-fluoroadenosine
  modified_base (19)..(19): cm
  modified_base (20)..(20): 2'-deoxy-2'-fluorouridine
  modified_base (21)..(21): gm
  modified_base (22)..(22): 2'-deoxy-2'-fluoroguanosine
  misc_feature (22)..(23): 5'-phosphonothioate
  modified_base (23)..(23): cm
cauuguggaugagucacacuggc

SEQ ID NO: 6117 - RNA, 23 nt, Artificial Sequence
  siRNA antisense strand against b2GPI
  modified_base (1)..(1): 2'-deoxy-2'-fluorouridine
  modified_base (2)..(2): cm
  misc_feature (2)..(3): 5'-phosphonothioate
  modified_base (3)..(3): 2'-deoxy-2'-fluoroadenosine
  modified_base (4)..(4): um
  modified_base (5)..(5): 2'-deoxy-2'-fluorouridine
  modified_base (6)..(6): gm
  modified_base (7)..(7): 2'-deoxy-2'-fluorouridine
  modified_base (8)..(8): gm
  modified_base (9)..(9): 2'-deoxy-2'-fluoroguanosine
  modified_base (10)..(10): 2'-O-methyladenosine
  modified_base (11)..(11): um
  modified_base (12)..(12): 2'-deoxy-2'-fluoroguanosine
  modified_base (13)..(13): 2'-O-methyladenosine
  modified_base (14)..(14): 2'-deoxy-2'-fluoroguanosine
  modified_base (15)..(15): um
  modified_base (16)..(16): 2'-deoxy-2'-fluorocytidine
  modified_base (17)..(17): 2'-O-methyladenosine
  modified_base (18)..(18): 2'-deoxy-2'-fluorocytidine
  modified_base (19)..(19): 2'-O-methyladenosine
  modified_base (20)..(20): 2'-deoxy-2'-fluorocytidine
  modified_base (21)..(21): um
  modified_base (22)..(22): 2'-deoxy-2'-fluoroguanosine
  misc_feature (22)..(23): 5'-phosphonothioate
  modified_base (23)..(23): gm
ucauuguggaugagucacacugg

SEQ ID NO: 6118 - RNA, 23 nt, Artificial Sequence
  siRNA antisense strand against b2GPI
  modified_base (1)..(1): 2'-deoxy-2'-fluoroadenosine
  modified_base (2)..(2): um
  misc_feature (2)..(3): 5'-phosphonothioate
  modified_base (3)..(3): 2'-deoxy-2'-fluorocytidine
  modified_base (4)..(4): 2'-O-methyladenosine
  modified_base (5)..(5): 2'-deoxy-2'-fluorouridine
  modified_base (6)..(6): um
  modified_base (7)..(7): 2'-deoxy-2'-fluoroguanosine
  modified_base (8)..(8): um
  modified_base (9)..(9): 2'-deoxy-2'-fluoroguanosine
  modified_base (10)..(10): gm
  modified_base (11)..(11): 2'-O-methyladenosine
  modified_base (12)..(12): 2'-deoxy-2'-fluorouridine
  modified_base (13)..(13): gm
  modified_base (14)..(14): 2'-deoxy-2'-fluoroadenosine
  modified_base (15)..(15): gm
  modified_base (16)..(16): 2'-deoxy-2'-fluorouridine
  modified_base (17)..(17): cm
  modified_base (18)..(18): 2'-deoxy-2'-fluoroadenosine
  modified_base (19)..(19): cm
  modified_base (20)..(20): 2'-deoxy-2'-fluoroadenosine
  modified_base (21)..(21): cm
  modified_base (22)..(22): 2'-deoxy-2'-fluorouridine
  misc_feature (22)..(23): 5'-phosphonothioate
  modified_base (23)..(23): gm
aucauuguggaugagucacacug

SEQ ID NO: 6119 - RNA, 23 nt, Artificial Sequence
  siRNA antisense strand against b2GPI
  modified_base (1)..(1): 2'-deoxy-2'-fluoroadenosine
  modified_base (2)..(2): 2'-O-methyladenosine
  misc_feature (2)..(3): 5'-phosphonothioate
  modified_base (3)..(3): 2'-deoxy-2'-fluorouridine
  modified_base (4)..(4): cm
  modified_base (5)..(5): 2'-deoxy-2'-fluoroadenosine
  modified_base (6)..(6): um
  modified_base (7)..(7): 2'-deoxy-2'-fluorouridine
  modified_base (8)..(8): gm
  modified_base (9)..(9): 2'-deoxy-2'-fluorouridine
  modified_base (10)..(10): gm
  modified_base (11)..(11): gm
  modified_base (12)..(12): 2'-deoxy-2'-fluoroadenosine
  modified_base (13)..(13): um
  modified_base (14)..(14): 2'-deoxy-2'-fluoroguanosine
  modified_base (15)..(15): 2'-O-methyladenosine
  modified_base (16)..(16): 2'-deoxy-2'-fluoroguanosine
  modified_base (17)..(17): um
  modified_base (18)..(18): 2'-deoxy-2'-fluorocytidine
  modified_base (19)..(19): 2'-O-methyladenosine
  modified_base (20)..(20): 2'-deoxy-2'-fluorocytidine
  modified_base (21)..(21): 2'-O-methyladenosine
  modified_base (22)..(22): 2'-deoxy-2'-fluorocytidine
  misc_feature (22)..(23): 5'-phosphonothioate
  modified_base (23)..(23): um
aaucauuguggaugagucacacu

SEQ ID NO: 6120 - RNA, 23 nt, Artificial Sequence
  siRNA antisense strand against b2GPI
  modified_base (1)..(1): 2'-deoxy-2'-fluoroadenosine
  modified_base (2)..(2): 2'-O-methyladenosine
  misc_feature (2)..(3): 5'-phosphonothioate
  modified_base (3)..(3): 2'-deoxy-2'-fluoroadenosine
  modified_base (4)..(4): um
  modified_base (5)..(5): 2'-deoxy-2'-fluorocytidine
  modified_base (6)..(6): 2'-O-methyladenosine
  modified_base (7)..(7): 2'-deoxy-2'-fluorouridine
  modified_base (8)..(8): um
  modified_base (9)..(9): 2'-deoxy-2'-fluoroguanosine
  modified_base (10)..(10): um
  modified_base (11)..(11): gm
  modified_base (12)..(12): 2'-deoxy-2'-fluoroguanosine
  modified_base (13)..(13): 2'-O-methyladenosine
  modified_base (14)..(14): 2'-deoxy-2'-fluorouridine
  modified_base (15)..(15): gm
  modified_base (16)..(16): 2'-deoxy-2'-fluoroadenosine
  modified_base (17)..(17): gm
  modified_base (18)..(18): 2'-deoxy-2'-fluorouridine
  modified_base (19)..(19): cm
  modified_base (20)..(20): 2'-deoxy-2'-fluoroadenosine
  modified_base (21)..(21): cm
  modified_base (22)..(22): 2'-deoxy-2'-fluoroadenosine
  misc_feature (22)..(23): 5'-phosphonothioate
  modified_base (23)..(23): cm
aaaucauuguggaugagucacac

SEQ ID NO: 6121 - RNA, 23 nt, Artificial Sequence
  siRNA antisense strand against b2GPI
  modified_base (1)..(1): 2'-deoxy-2'-fluoroguanosine
  modified_base (2)..(2): 2'-O-methyladenosine
  misc_feature (2)..(3): 5'-phosphonothioate
  modified_base (3)..(3): 2'-deoxy-2'-fluoroadenosine
  modified_base (4)..(4): 2'-O-methyladenosine
  modified_base (5)..(5): 2'-deoxy-2'-fluorouridine
  modified_base (6)..(6): cm
  modified_base (7)..(7): 2'-deoxy-2'-fluoroadenosine
  modified_base (8)..(8): um
  modified_base (9)..(9): 2'-deoxy-2'-fluorouridine
  modified_base (10)..(10): gm
  modified_base (11)..(11): um
  modified_base (12)..(12): 2'-deoxy-2'-fluoroguanosine
  modified_base (13)..(13): gm
  modified_base (14)..(14): 2'-deoxy-2'-fluoroadenosine
  modified_base (15)..(15): um
  modified_base (16)..(16): 2'-deoxy-2'-fluoroguanosine
  modified_base (17)..(17): 2'-O-methyladenosine
  modified_base (18)..(18): 2'-deoxy-2'-fluoroguanosine
  modified_base (19)..(19): um
  modified_base (20)..(20): 2'-deoxy-2'-fluorocytidine
  modified_base (21)..(21): 2'-O-methyladenosine
  modified_base (22)..(22): 2'-deoxy-2'-fluorocytidine
  misc_feature (22)..(23): 5'-phosphonothioate
  modified_base (23)..(23): 2'-O-methyladenosine
gaaaucauuguggaugagucaca

SEQ ID NO: 6122 - RNA, 23 nt, Artificial Sequence
  siRNA antisense strand against b2GPI
  modified_base (1)..(1): 2'-deoxy-2'-fluoroadenosine
  modified_base (2)..(2): gm
  misc_feature (2)..(3): 5'-phosphonothioate
  modified_base (3)..(3): 2'-deoxy-2'-fluoroadenosine
  modified_base (4)..(4): 2'-O-methyladenosine
  modified_base (5)..(5): 2'-deoxy-2'-fluoroadenosine
  modified_base (6)..(6): um
  modified_base (7)..(7): 2'-deoxy-2'-fluorocytidine
  modified_base (8)..(8): 2'-O-methyladenosine
  modified_base (9)..(9): 2'-deoxy-2'-fluorouridine
  modified_base (10)..(10): um
  modified_base (11)..(11): gm
  modified_base (12)..(12): 2'-deoxy-2'-fluorouridine
  modified_base (13)..(13): gm
  modified_base (14)..(14): 2'-deoxy-2'-fluoroguanosine
  modified_base (15)..(15): 2'-O-methyladenosine
  modified_base (16)..(16): 2'-deoxy-2'-fluorouridine
  modified_base (17)..(17): gm
  modified_base (18)..(18): 2'-deoxy-2'-fluoroadenosine
  modified_base (19)..(19): gm
  modified_base (20)..(20): 2'-deoxy-2'-fluorouridine
  modified_base (21)..(21): cm
  modified_base (22)..(22): 2'-deoxy-2'-fluoroadenosine
  misc_feature (22)..(23): 5'-phosphonothioate
  modified_base (23)..(23): cm
agaaaucauuguggaugagucac

SEQ ID NO: 6123 - RNA, 23 nt, Artificial Sequence
  siRNA antisense strand against b2GPI
  modified_base (1)..(1): 2'-deoxy-2'-fluoroguanosine
  modified_base (2)..(2): gm
  misc_feature (2)..(3): 5'-phosphonothioate
  modified_base (3)..(3): 2'-deoxy-2'-fluoroadenosine
  modified_base (4)..(4): gm
  modified_base (5)..(5): 2'-deoxy-2'-fluoroadenosine
  modified_base (6)..(6): 2'-O-methyladenosine
  modified_base (7)..(7): 2'-deoxy-2'-fluoroadenosine
  modified_base (8)..(8): um
  modified_base (9)..(9): 2'-deoxy-2'-fluorocytidine
  modified_base (10)..(10): 2'-O-methyladenosine
  modified_base (11)..(11): um
  modified_base (12)..(12): 2'-deoxy-2'-fluorouridine
  modified_base (13)..(13): gm
  modified_base (14)..(14): 2'-deoxy-2'-fluorouridine
  modified_base (15)..(15): gm
  modified_base (16)..(16): 2'-deoxy-2'-fluoroguanosine
  modified_base (17)..(17): 2'-O-methyladenosine
  modified_base (18)..(18): 2'-deoxy-2'-fluorouridine
  modified_base (19)..(19): gm
  modified_base (20)..(20): 2'-deoxy-2'-fluoroadenosine
  modified_base (21)..(21): gm
  modified_base (22)..(22): 2'-deoxy-2'-fluorouridine
  misc_feature (22)..(23): 5'-phosphonothioate
  modified_base (23)..(23): cm
ggagaaaucauuguggaugaguc

SEQ ID NO: 6124 - RNA, 23 nt, Artificial Sequence
  siRNA antisense strand against b2GPI
  modified_base (1)..(1): 2'-deoxy-2'-fluorouridine
  modified_base (2)..(2): gm
  misc_feature (2)..(3): 5'-phosphonothioate
  modified_base (3)..(3): 2'-deoxy-2'-fluoroguanosine
  modified_base (4)..(4): 2'-O-methyladenosine
  modified_base (5)..(5): 2'-deoxy-2'-fluoroguanosine
  modified_base (6)..(6): 2'-O-methyladenosine
  modified_base (7)..(7): 2'-deoxy-2'-fluoroadenosine
  modified_base (8)..(8): 2'-O-methyladenosine
  modified_base (9)..(9): 2'-deoxy-2'-fluorouridine
  modified_base (10)..(10): cm
  modified_base (11)..(11): 2'-O-methyladenosine
  modified_base (12)..(12): 2'-deoxy-2'-fluorouridine
  modified_base (13)..(13): um
  modified_base (14)..(14): 2'-deoxy-2'-fluoroguanosine
  modified_base (15)..(15): um
  modified_base (16)..(16): 2'-deoxy-2'-fluoroguanosine
  modified_base (17)..(17): gm
  modified_base (18)..(18): 2'-deoxy-2'-fluoroadenosine
  modified_base (19)..(19): um
  modified_base (20)..(20): 2'-deoxy-2'-fluoroguanosine
  modified_base (21)..(21): 2'-O-methyladenosine
  modified_base (22)..(22): 2'-deoxy-2'-fluoroguanosine
  misc_feature (22)..(23): 5'-phosphonothioate
  modified_base (23)..(23): um
uggagaaaucauuguggaugagu

SEQ ID NO: 6125 - RNA, 23 nt, Artificial Sequence
  siRNA antisense strand against b2GPI
  modified_base (1)..(1): 2'-deoxy-2'-fluorocytidine
  modified_base (2)..(2): um
  misc_feature (2)..(3): 5'-phosphonothioate
  modified_base (3)..(3): 2'-deoxy-2'-fluoroguanosine
  modified_base (4)..(4): gm
  modified_base (5)..(5): 2'-deoxy-2'-fluoroadenosine
  modified_base (6)..(6): gm
  modified_base (7)..(7): 2'-deoxy-2'-fluoroadenosine
  modified_base (8)..(8): 2'-O-methyladenosine
  modified_base (9)..(9): 2'-deoxy-2'-fluoroadenosine
  modified_base (10)..(10): um
  modified_base (11)..(11): cm
  modified_base (12)..(12): 2'-deoxy-2'-fluoroadenosine
  modified_base (13)..(13): um
  modified_base (14)..(14): 2'-deoxy-2'-fluorouridine
  modified_base (15)..(15): gm
  modified_base (16)..(16): 2'-deoxy-2'-fluorouridine
  modified_base (17)..(17): gm
  modified_base (18)..(18): 2'-deoxy-2'-fluoroguanosine
  modified_base (19)..(19): 2'-O-methyladenosine
  modified_base (20)..(20): 2'-deoxy-2'-fluorouridine
  modified_base (21)..(21): gm
  modified_base (22)..(22): 2'-deoxy-2'-fluoroadenosine
  misc_feature (22)..(23): 5'-phosphonothioate
  modified_base (23)..(23): gm
cuggagaaaucauuguggaugag

SEQ ID NO: 6126 - RNA, 23 nt, Artificial Sequence
  siRNA antisense strand against b2GPI
  modified_base (1)..(1): 2'-deoxy-2'-fluoroadenosine
  modified_base (2)..(2): cm
  misc_feature (2)..(3): 5'-phosphonothioate
  modified_base (3)..(3): 2'-deoxy-2'-fluorouridine
  modified_base (4)..(4): gm
  modified_base (5)..(5): 2'-deoxy-2'-fluoroguanosine
  modified_base (6)..(6): 2'-O-methyladenosine
  modified_base (7)..(7): 2'-deoxy-2'-fluoroguanosine
  modified_base (8)..(8): 2'-O-methyladenosine
  modified_base (9)..(9): 2'-deoxy-2'-fluoroadenosine
  modified_base (10)..(10): 2'-O-methyladenosine
  modified_base (11)..(11): um
  modified_base (12)..(12): 2'-deoxy-2'-fluorocytidine
  modified_base (13)..(13): 2'-O-methyladenosine
  modified_base (14)..(14): 2'-deoxy-2'-fluorouridine
  modified_base (15)..(15): um
  modified_base (16)..(16): 2'-deoxy-2'-fluoroguanosine
  modified_base (17)..(17): um
  modified_base (18)..(18): 2'-deoxy-2'-fluoroguanosine
  modified_base (19)..(19): gm
  modified_base (20)..(20): 2'-deoxy-2'-fluoroadenosine
  modified_base (21)..(21): um
  modified_base (22)..(22): 2'-deoxy-2'-fluoroguanosine
  misc_feature (22)..(23): 5'-phosphonothioate
  modified_base (23)..(23): 2'-O-methyladenosine
acuggagaaaucauuguggauga

SEQ ID NO: 6127 - RNA, 23 nt, Artificial Sequence
  siRNA antisense strand against b2GPI
  modified_base (1)..(1): 2'-deoxy-2'-fluorocytidine
  modified_base (2)..(2): 2'-O-methyladenosine
  misc_feature (2)..(3): 5'-phosphonothioate
  modified_base (3)..(3): 2'-deoxy-2'-fluorocytidine
  modified_base (4)..(4): um
  modified_base (5)..(5): 2'-deoxy-2'-fluoroguanosine
  modified_base (6)..(6): gm
  modified_base (7)..(7): 2'-deoxy-2'-fluoroadenosine
  modified_base (8)..(8): gm
  modified_base (9)..(9): 2'-deoxy-2'-fluoroadenosine
  modified_base (10)..(10): 2'-O-methyladenosine
  modified_base (11)..(11): 2'-O-methyladenosine
  modified_base (12)..(12): 2'-deoxy-2'-fluorouridine
  modified_base (13)..(13): cm
  modified_base (14)..(14): 2'-deoxy-2'-fluoroadenosine
  modified_base (15)..(15): um
  modified_base (16)..(16): 2'-deoxy-2'-fluorouridine
  modified_base (17)..(17): gm
  modified_base (18)..(18): 2'-deoxy-2'-fluorouridine
  modified_base (19)..(19): gm
  modified_base (20)..(20): 2'-deoxy-2'-fluoroguanosine
  modified_base (21)..(21): 2'-O-methyladenosine
  modified_base (22)..(22): 2'-deoxy-2'-fluorouridine
  misc_feature (22)..(23): 5'-phosphonothioate
  modified_base (23)..(23): gm
cacuggagaaaucauuguggaug

SEQ ID NO: 6128 - RNA, 23 nt, Artificial Sequence
  siRNA antisense strand against b2GPI
  modified_base (1)..(1): 2'-deoxy-2'-fluoroguanosine
  modified_base (2)..(2): cm
  misc_feature (2)..(3): 5'-phosphonothioate
  modified_base (3)..(3): 2'-deoxy-2'-fluoroadenosine
  modified_base (4)..(4): cm
  modified_base (5)..(5): 2'-deoxy-2'-fluorouridine
  modified_base (6)..(6): gm
  modified_base (7)..(7): 2'-deoxy-2'-fluoroguanosine
  modified_base (8)..(8): 2'-O-methyladenosine
  modified_base (9)..(9): 2'-deoxy-2'-fluoroguanosine
  modified_base (10)..(10): 2'-O-methyladenosine
  modified_base (11)..(11): 2'-O-methyladenosine
  modified_base (12)..(12): 2'-deoxy-2'-fluoroadenosine
  modified_base (13)..(13): um
  modified_base (14)..(14): 2'-deoxy-2'-fluorocytidine
  modified_base (15)..(15): 2'-O-methyladenosine
  modified_base (16)..(16): 2'-deoxy-2'-fluorouridine
  modified_base (17)..(17): um
  modified_base (18)..(18): 2'-deoxy-2'-fluoroguanosine
  modified_base (19)..(19): um
  modified_base (20)..(20): 2'-deoxy-2'-fluoroguanosine
  modified_base (21)..(21): gm
  modified_base (22)..(22): 2'-deoxy-2'-fluoroadenosine
  misc_feature (22)..(23): 5'-phosphonothioate
  modified_base (23)..(23): um
gcacuggagaaaucauuguggau

SEQ ID NO: 6129 - RNA, 23 nt, Artificial Sequence
  siRNA antisense strand against b2GPI
  modified_base (1)..(1): 2'-deoxy-2'-fluoroadenosine
  modified_base (2)..(2): gm
  misc_feature (2)..(3): 5'-phosphonothioate
  modified_base (3)..(3): 2'-deoxy-2'-fluorocytidine
  modified_base (4)..(4): 2'-O-methyladenosine
  modified_base (5)..(5): 2'-deoxy-2'-fluorocytidine
  modified_base (6)..(6): um
  modified_base (7)..(7): 2'-deoxy-2'-fluoroguanosine
  modified_base (8)..(8): gm
  modified_base (9)..(9): 2'-deoxy-2'-fluoroadenosine
  modified_base (10)..(10): gm
  modified_base (11)..(11): 2'-O-methyladenosine
  modified_base (12)..(12): 2'-deoxy-2'-fluoroadenosine
  modified_base (13)..(13): 2'-O-methyladenosine
  modified_base (14)..(14): 2'-deoxy-2'-fluorouridine
  modified_base (15)..(15): cm
  modified_base (16)..(16): 2'-deoxy-2'-fluoroadenosine
  modified_base (17)..(17): um
  modified_base (18)..(18): 2'-deoxy-2'-fluorouridine
  modified_base (19)..(19): gm
  modified_base (20)..(20): 2'-deoxy-2'-fluorouridine
  modified_base (21)..(21): gm
  modified_base (22)..(22): 2'-deoxy-2'-fluoroguanosine
  misc_feature (22)..(23): 5'-phosphonothioate
  modified_base (23)..(23): 2'-O-methyladenosine
agcacuggagaaaucauugugga

SEQ ID NO: 6130 - RNA, 23 nt, Artificial Sequence
  siRNA antisense strand against b2GPI
  modified_base (1)..(1): 2'-deoxy-2'-fluoroguanosine
  modified_base (2)..(2): 2'-O-methyladenosine
  misc_feature (2)..(3): 5'-phosphonothioate
  modified_base (3)..(3): 2'-deoxy-2'-fluoroguanosine
  modified_base (4)..(4): cm
  modified_base (5)..(5): 2'-deoxy-2'-fluoroadenosine
  modified_base (6)..(6): cm
  modified_base (7)..(7): 2'-deoxy-2'-fluorouridine
  modified_base (8)..(8): gm
  modified_base (9)..(9): 2'-deoxy-2'-fluoroguanosine
  modified_base (10)..(10): 2'-O-methyladenosine
  modified_base (11)..(11): gm
  modified_base (12)..(12): 2'-deoxy-2'-fluoroadenosine
  modified_base (13)..(13): 2'-O-methyladenosine
  modified_base (14)..(14): 2'-deoxy-2'-fluoroadenosine
  modified_base (15)..(15): um
  modified_base (16)..(16): 2'-deoxy-2'-fluorocytidine
  modified_base (17)..(17): 2'-O-methyladenosine
  modified_base (18)..(18): 2'-deoxy-2'-fluorouridine
  modified_base (19)..(19): um
  modified_base (20)..(20): 2'-deoxy-2'-fluoroguanosine
  modified_base (21)..(21): um
  modified_base (22)..(22): 2'-deoxy-2'-fluoroguanosine
  misc_feature (22)..(23): 5'-phosphonothioate
  modified_base (23)..(23): gm
gagcacuggagaaaucauugugg

SEQ ID NO: 6131 - RNA, 23 nt, Artificial Sequence
  siRNA antisense strand against b2GPI
  modified_base (1)..(1): 2'-deoxy-2'-fluorouridine
  modified_base (2)..(2): gm
  misc_feature (2)..(3): 5'-phosphonothioate
  modified_base (3)..(3): 2'-deoxy-2'-fluoroadenosine
  modified_base (4)..(4): gm
  modified_base (5)..(5): 2'-deoxy-2'-fluorocytidine
  modified_base (6)..(6): 2'-O-methyladenosine
  modified_base (7)..(7): 2'-deoxy-2'-fluorocytidine
  modified_base (8)..(8): um
  modified_base (9)..(9): 2'-deoxy-2'-fluoroguanosine
  modified_base (10)..(10): gm
  modified_base (11)..(11): 2'-O-methyladenosine
  modified_base (12)..(12): 2'-deoxy-2'-fluoroguanosine
  modified_base (13)..(13): 2'-O-methyladenosine
  modified_base (14)..(14): 2'-deoxy-2'-fluoroadenosine
  modified_base (15)..(15): 2'-O-methyladenosine
  modified_base (16)..(16): 2'-deoxy-2'-fluorouridine
  modified_base (17)..(17): cm
  modified_base (18)..(18): 2'-deoxy-2'-fluoroadenosine
  modified_base (19)..(19): um
  modified_base (20)..(20): 2'-deoxy-2'-fluorouridine
  modified_base (21)..(21): gm
  modified_base (22)..(22): 2'-deoxy-2'-fluorouridine
  misc_feature (22)..(23): 5'-phosphonothioate
  modified_base (23)..(23): gm
ugagcacuggagaaaucauugug

SEQ ID NO: 6132 - RNA, 23 nt, Artificial Sequence
  siRNA antisense strand against b2GPI
  modified_base (1)..(1): 2'-deoxy-2'-fluoroadenosine
  modified_base (2)..(2): um
  misc_feature (2)..(3): 5'-phosphonothioate
  modified_base (3)..(3): 2'-deoxy-2'-fluoroguanosine
  modified_base (4)..(4): 2'-O-methyladenosine
  modified_base (5)..(5): 2'-deoxy-2'-fluoroguanosine
  modified_base (6)..(6): cm
  modified_base (7)..(7): 2'-deoxy-2'-fluoroadenosine
  modified_base (8)..(8): cm
  modified_base (9)..(9): 2'-deoxy-2'-fluorouridine
  modified_base (10)..(10): gm
  modified_base (11)..(11): gm
  modified_base (12)..(12): 2'-deoxy-2'-fluoroadenosine
  modified_base (13)..(13): gm
  modified_base (14)..(14): 2'-deoxy-2'-fluoroadenosine
  modified_base (15)..(15): 2'-O-methyladenosine
  modified_base (16)..(16): 2'-deoxy-2'-fluoroadenosine
  modified_base (17)..(17): um
  modified_base (18)..(18): 2'-deoxy-2'-fluorocytidine
  modified_base (19)..(19): 2'-O-methyladenosine
  modified_base (20)..(20): 2'-deoxy-2'-fluorouridine
  modified_base (21)..(21): um
  modified_base (22)..(22): 2'-deoxy-2'-fluoroguanosine
  misc_feature (22)..(23): 5'-phosphonothioate
  modified_base (23)..(23): um
augagcacuggagaaaucauugu

SEQ ID NO: 6133 - RNA, 23 nt, Artificial Sequence
  siRNA antisense strand against b2GPI
  modified_base (1)..(1): 2'-deoxy-2'-fluoroguanosine
  modified_base (2)..(2): 2'-O-methyladenosine
  misc_feature (2)..(3): 5'-phosphonothioate
  modified_base (3)..(3): 2'-deoxy-2'-fluorouridine
  modified_base (4)..(4): gm
  modified_base (5)..(5): 2'-deoxy-2'-fluoroadenosine
  modified_base (6)..(6): gm
  modified_base (7)..(7): 2'-deoxy-2'-fluorocytidine
  modified_base (8)..(8): 2'-O-methyladenosine
  modified_base (9)..(9): 2'-deoxy-2'-fluorocytidine
  modified_base (10)..(10): um
  modified_base (11)..(11): gm
  modified_base (12)..(12): 2'-deoxy-2'-fluoroguanosine
  modified_base (13)..(13): 2'-O-methyladenosine
  modified_base (14)..(14): 2'-deoxy-2'-fluoroguanosine
  modified_base (15)..(15): 2'-O-methyladenosine
  modified_base (16)..(16): 2'-deoxy-2'-fluoroadenosine
  modified_base (17)..(17): 2'-O-methyladenosine
  modified_base (18)..(18): 2'-deoxy-2'-fluorouridine
  modified_base (19)..(19): cm
  modified_base (20)..(20): 2'-deoxy-2'-fluoroadenosine
  modified_base (21)..(21): um
  modified_base (22)..(22): 2'-deoxy-2'-fluorouridine
  misc_feature (22)..(23): 5'-phosphonothioate
  modified_base (23)..(23): gm
gaugagcacuggagaaaucauug

SEQ ID NO: 6134 - RNA, 23 nt, Artificial Sequence
  siRNA antisense strand against b2GPI
  modified_base (1)..(1): 2'-deoxy-2'-fluoroadenosine
  modified_base (2)..(2): gm
  misc_feature (2)..(3): 5'-phosphonothioate
  modified_base (3)..(3): 2'-deoxy-2'-fluoroadenosine
  modified_base (4)..(4): um
  modified_base (5)..(5): 2'-deoxy-2'-fluoroguanosine
  modified_base (6)..(6): 2'-O-methyladenosine
  modified_base (7)..(7): 2'-deoxy-2'-fluoroguanosine
  modified_base (8)..(8): cm
  modified_base (9)..(9): 2'-deoxy-2'-fluoroadenosine
  modified_base (10)..(10): cm
  modified_base (11)..(11): um
  modified_base (12)..(12): 2'-deoxy-2'-fluoroguanosine
  modified_base (13)..(13): gm
  modified_base (14)..(14): 2'-deoxy-2'-fluoroadenosine
  modified_base (15)..(15): gm
  modified_base (16)..(16): 2'-deoxy-2'-fluoroadenosine
  modified_base (17)..(17): 2'-O-methyladenosine
  modified_base (18)..(18): 2'-deoxy-2'-fluoroadenosine
  modified_base (19)..(19): um
  modified_base (20)..(20): 2'-deoxy-2'-fluorocytidine
  modified_base (21)..(21): 2'-O-methyladenosine
  modified_base (22)..(22): 2'-deoxy-2'-fluorouridine
  misc_feature (22)..(23): 5'-phosphonothioate
  modified_base (23)..(23): um
agaugagcacuggagaaaucauu

SEQ ID NO: 6135 - RNA, 23 nt, Artificial Sequence
  siRNA antisense strand against b2GPI
  modified_base (1)..(1): 2'-deoxy-2'-fluoroadenosine
  modified_base (2)..(2): 2'-O-methyladenosine
  misc_feature (2)..(3): 5'-phosphonothioate
  modified_base (3)..(3): 2'-deoxy-2'-fluoroguanosine
  modified_base (4)..(4): 2'-O-methyladenosine
  modified_base (5)..(5): 2'-deoxy-2'-fluorouridine
  modified_base (6)..(6): gm
  modified_base (7)..(7): 2'-deoxy-2'-fluoroadenosine
  modified_base (8)..(8): gm
  modified_base (9)..(9): 2'-deoxy-2'-fluorocytidine
  modified_base (10)..(10): 2'-O-methyladenosine
  modified_base (11)..(11): cm
  modified_base (12)..(12): 2'-deoxy-2'-fluorouridine
  modified_base (13)..(13): gm
  modified_base (14)..(14): 2'-deoxy-2'-fluoroguanosine
  modified_base (15)..(15): 2'-O-methyladenosine
  modified_base (16)..(16): 2'-deoxy-2'-fluoroguanosine
  modified_base (17)..(17): 2'-O-methyladenosine
  modified_base (18)..(18): 2'-deoxy-2'-fluoroadenosine
  modified_base (19)..(19): 2'-O-methyladenosine
  modified_base (20)..(20): 2'-deoxy-2'-fluorouridine
  modified_base (21)..(21): cm
  modified_base (22)..(22): 2'-deoxy-2'-fluoroadenosine
  misc_feature (22)..(23): 5'-phosphonothioate
  modified_base (23)..(23): um
aagaugagcacuggagaaaucau

SEQ ID NO: 6136 - RNA, 23 nt, Artificial Sequence
  siRNA antisense strand against b2GPI
  modified_base (1)..(1): 2'-deoxy-2'-fluorocytidine
  modified_base (2)..(2): 2'-O-methyladenosine
  misc_feature (2)..(3): 5'-phosphonothioate
  modified_base (3)..(3): 2'-deoxy-2'-fluoroadenosine
  modified_base (4)..(4): gm
  modified_base (5)..(5): 2'-deoxy-2'-fluoroadenosine
  modified_base (6)..(6): um
  modified_base (7)..(7): 2'-deoxy-2'-fluoroguanosine
  modified_base (8)..(8): 2'-O-methyladenosine
  modified_base (9)..(9): 2'-deoxy-2'-fluoroguanosine
  modified_base (10)..(10): cm
  modified_base (11)..(11): 2'-O-methyladenosine
  modified_base (12)..(12): 2'-deoxy-2'-fluorocytidine
  modified_base (13)..(13): um
  modified_base (14)..(14): 2'-deoxy-2'-fluoroguanosine
  modified_base (15)..(15): gm
  modified_base (16)..(16): 2'-deoxy-2'-fluoroadenosine
  modified_base (17)..(17): gm
  modified_base (18)..(18): 2'-deoxy-2'-fluoroadenosine
  modified_base (19)..(19): 2'-O-methyladenosine
  modified_base (20)..(20): 2'-deoxy-2'-fluoroadenosine
  modified_base (21)..(21): um
  modified_base (22)..(22): 2'-deoxy-2'-fluorocytidine
  misc_feature (22)..(23): 5'-phosphonothioate
  modified_base (23)..(23): 2'-O-methyladenosine
caagaugagcacuggagaaauca

SEQ ID NO: 6137 - RNA, 23 nt, Artificial Sequence
  siRNA antisense strand against b2GPI
  modified_base (1)..(1): 2'-deoxy-2'-fluoroadenosine
  modified_base (2)..(2): cm
  misc_feature (2)..(3): 5'-phosphonothioate
  modified_base (3)..(3): 2'-deoxy-2'-fluoroadenosine
  modified_base (4)..(4): 2'-O-methyladenosine
  modified_base (5)..(5): 2'-deoxy-2'-fluoroguanosine
  modified_base (6)..(6): 2'-O-methyladenosine
  modified_base (7)..(7): 2'-deoxy-2'-fluorouridine
  modified_base (8)..(8): gm
  modified_base (9)..(9): 2'-deoxy-2'-fluoroadenosine
  modified_base (10)..(10): gm
  modified_base (11)..(11): cm
  modified_base (12)..(12): 2'-deoxy-2'-fluoroadenosine
  modified_base (13)..(13): cm
  modified_base (14)..(14): 2'-deoxy-2'-fluorouridine
  modified_base (15)..(15): gm
  modified_base (16)..(16): 2'-deoxy-2'-fluoroguanosine
  modified_base (17)..(17): 2'-O-methyladenosine
  modified_base (18)..(18): 2'-deoxy-2'-fluoroguanosine
  modified_base (19)..(19): 2'-O-methyladenosine
  modified_base (20)..(20): 2'-deoxy-2'-fluoroadenosine
  modified_base (21)..(21): 2'-O-methyladenosine
  modified_base (22)..(22): 2'-deoxy-2'-fluorouridine
  misc_feature (22)..(23): 5'-phosphonothioate
  modified_base (23)..(23): cm
acaagaugagcacuggagaaauc

SEQ ID NO: 6138 - RNA, 23 nt, Artificial Sequence
  siRNA antisense strand against b2GPI
  modified_base (1)..(1): 2'-deoxy-2'-fluoroadenosine
  modified_base (2)..(2): 2'-O-methyladenosine
  misc_feature (2)..(3): 5'-phosphonothioate
  modified_base (3)..(3): 2'-deoxy-2'-fluorocytidine
  modified_base (4)..(4): 2'-O-methyladenosine
  modified_base (5)..(5): 2'-deoxy-2'-fluoroadenosine
  modified_base (6)..(6): gm
  modified_base (7)..(7): 2'-deoxy-2'-fluoroadenosine
  modified_base (8)..(8): um
  modified_base (9)..(9): 2'-deoxy-2'-fluoroguanosine
  modified_base (10)..(10): 2'-O-methyladenosine
  modified_base (11)..(11): gm
  modified_base (12)..(12): 2'-deoxy-2'-fluorocytidine
  modified_base (13)..(13): 2'-O-methyladenosine
  modified_base (14)..(14): 2'-deoxy-2'-fluorocytidine
  modified_base (15)..(15): um
  modified_base (16)..(16): 2'-deoxy-2'-fluoroguanosine
  modified_base (17)..(17): gm
  modified_base (18)..(18): 2'-deoxy-2'-fluoroadenosine
  modified_base (19)..(19): gm
  modified_base (20)..(20): 2'-deoxy-2'-fluoroadenosine
  modified_base (21)..(21): 2'-O-methyladenosine
  modified_base (22)..(22): 2'-deoxy-2'-fluoroadenosine
  misc_feature (22)..(23): 5'-phosphonothioate
  modified_base (23)..(23): um
aacaagaugagcacuggagaaau

SEQ ID NO: 6139 - RNA, 23 nt, Artificial Sequence
  siRNA antisense strand against b2GPI
  modified_base (1)..(1): 2'-deoxy-2'-fluoroguanosine
  modified_base (2)..(2): 2'-O-methyladenosine
  misc_feature (2)..(3): 5'-phosphonothioate
  modified_base (3)..(3): 2'-deoxy-2'-fluoroadenosine
  modified_base (4)..(4): cm
  modified_base (5)..(5): 2'-deoxy-2'-fluoroadenosine
  modified_base (6)..(6): 2'-O-methyladenosine
  modified_base (7)..(7): 2'-deoxy-2'-fluoroguanosine
  modified_base (8)..(8): 2'-O-methyladenosine
  modified_base (9)..(9): 2'-deoxy-2'-fluorouridine
  modified_base (10)..(10): gm
  modified_base (11)..(11): 2'-O-methyladenosine
  modified_base (12)..(12): 2'-deoxy-2'-fluoroguanosine
  modified_base (13)..(13): cm
  modified_base (14)..(14): 2'-deoxy-2'-fluoroadenosine
  modified_base (15)..(15): cm
  modified_base (16)..(16): 2'-deoxy-2'-fluorouridine
  modified_base (17)..(17): gm
  modified_base (18)..(18): 2'-deoxy-2'-fluoroguanosine
  modified_base (19)..(19): 2'-O-methyladenosine
  modified_base (20)..(20): 2'-deoxy-2'-fluoroguanosine
  modified_base (21)..(21): 2'-O-methyladenosine
  modified_base (22)..(22): 2'-deoxy-2'-fluoroadenosine
  misc_feature (22)..(23): 5'-phosphonothioate
  modified_base (23)..(23): 2'-O-methyladenosine
gaacaagaugagcacuggagaaa

SEQ ID NO: 6140 - RNA, 23 nt, Artificial Sequence
  siRNA antisense strand against b2GPI
  modified_base (1)..(1): 2'-deoxy-2'-fluoroadenosine
  modified_base (2)..(2): gm
  misc_feature (2)..(3): 5'-phosphonothioate
  modified_base (3)..(3): 2'-deoxy-2'-fluoroadenosine
  modified_base (4)..(4): 2'-O-methyladenosine
  modified_base (5)..(5): 2'-deoxy-2'-fluorocytidine
  modified_base (6)..(6): 2'-O-methyladenosine
  modified_base (7)..(7): 2'-deoxy-2'-fluoroadenosine
  modified_base (8)..(8): gm
  modified_base (9)..(9): 2'-deoxy-2'-fluoroadenosine
  modified_base (10)..(10): um
  modified_base (11)..(11): gm
  modified_base (12)..(12): 2'-deoxy-2'-fluoroadenosine
  modified_base (13)..(13): gm
  modified_base (14)..(14): 2'-deoxy-2'-fluorocytidine
  modified_base (15)..(15): 2'-O-methyladenosine
  modified_base (16)..(16): 2'-deoxy-2'-fluorocytidine
  modified_base (17)..(17): um
  modified_base (18)..(18): 2'-deoxy-2'-fluoroguanosine
  modified_base (19)..(19): gm
  modified_base (20)..(20): 2'-deoxy-2'-fluoroadenosine
  modified_base (21)..(21): gm
  modified_base (22)..(22): 2'-deoxy-2'-fluoroadenosine
  misc_feature (22)..(23): 5'-phosphonothioate
  modified_base (23)..(23): 2'-O-methyladenosine
agaacaagaugagcacuggagaa

SEQ ID NO: 6141 - RNA, 23 nt, Artificial Sequence
  siRNA antisense strand against b2GPI
  modified_base (1)..(1): 2'-deoxy-2'-fluoroguanosine
  modified_base (2)..(2): 2'-O-methyladenosine
  misc_feature (2)..(3): 5'-phosphonothioate
  modified_base (3)..(3): 2'-deoxy-2'-fluoroguanosine
  modified_base (4)..(4): 2'-O-methyladenosine
  modified_base (5)..(5): 2'-deoxy-2'-fluoroadenosine
  modified_base (6)..(6): cm
  modified_base (7)..(7): 2'-deoxy-2'-fluoroadenosine
  modified_base (8)..(8): 2'-O-methyladenosine
  modified_base (9)..(9): 2'-deoxy-2'-fluoroguanosine
  modified_base (10)..(10): 2'-O-methyladenosine
  modified_base (11)..(11): um
  modified_base (12)..(12): 2'-deoxy-2'-fluoroguanosine
  modified_base (13)..(13): 2'-O-methyladenosine
  modified_base (14)..(14): 2'-deoxy-2'-fluoroguanosine
  modified_base (15)..(15): cm
  modified_base (16)..(16): 2'-deoxy-2'-fluoroadenosine
  modified_base (17)..(17): cm
  modified_base (18)..(18): 2'-deoxy-2'-fluorouridine
  modified_base (19)..(19): gm
  modified_base (20)..(20): 2'-deoxy-2'-fluoroguanosine
  modified_base (21)..(21): 2'-O-methyladenosine
  modified_base (22)..(22): 2'-deoxy-2'-fluoroguanosine
  misc_feature (22)..(23): 5'-phosphonothioate
  modified_base (23)..(23): 2'-O-methyladenosine
gagaacaagaugagcacuggaga

SEQ ID NO: 6142 - RNA, 23 nt, Artificial Sequence
  siRNA antisense strand against b2GPI
  modified_base (1)..(1): 2'-deoxy-2'-fluorocytidine
  modified_base (2)..(2): gm
  misc_feature (2)..(3): 5'-phosphonothioate
  modified_base (3)..(3): 2'-deoxy-2'-fluoroadenosine
  modified_base (4)..(4): gm
  modified_base (5)..(5): 2'-deoxy-2'-fluoroadenosine
  modified_base (6)..(6): 2'-O-methyladenosine
  modified_base (7)..(7): 2'-deoxy-2'-fluorocytidine
  modified_base (8)..(8): 2'-O-methyladenosine
  modified_base (9)..(9): 2'-deoxy-2'-fluoroadenosine
  modified_base (10)..(10): gm
  modified_base (11)..(11): 2'-O-methyladenosine
  modified_base (12)..(12): 2'-deoxy-2'-fluorouridine
  modified_base (13)..(13): gm
  modified_base (14)..(14): 2'-deoxy-2'-fluoroadenosine
  modified_base (15)..(15): gm
  modified_base (16)..(16): 2'-deoxy-2'-fluorocytidine
  modified_base (17)..(17): 2'-O-methyladenosine
  modified_base (18)..(18): 2'-deoxy-2'-fluorocytidine
  modified_base (19)..(19): um
  modified_base (20)..(20): 2'-deoxy-2'-fluoroguanosine
  modified_base (21)..(21): gm
  modified_base (22)..(22): 2'-deoxy-2'-fluoroadenosine
  misc_feature (22)..(23): 5'-phosphonothioate
  modified_base (23)..(23): gm
cgagaacaagaugagcacuggag

SEQ ID NO: 6143 - RNA, 23 nt, Artificial Sequence
  siRNA antisense strand against b2GPI
  modified_base (1)..(1): 2'-deoxy-2'-fluorouridine
  modified_base (2)..(2): cm
  misc_feature (2)..(3): 5'-phosphonothioate
  modified_base (3)..(3): 2'-deoxy-2'-fluoroguanosine
  modified_base (4)..(4): 2'-O-methyladenosine
  modified_base (5)..(5): 2'-deoxy-2'-fluoroguanosine
  modified_base (6)..(6): 2'-O-methyladenosine
  modified_base (7)..(7): 2'-deoxy-2'-fluoroadenosine
  modified_base (8)..(8): cm
  modified_base (9)..(9): 2'-deoxy-2'-fluoroadenosine
  modified_base (10)..(10): 2'-O-methyladenosine
  modified_base (11)..(11): gm
  modified_base (12)..(12): 2'-deoxy-2'-fluoroadenosine
  modified_base (13)..(13): um
  modified_base (14)..(14): 2'-deoxy-2'-fluoroguanosine
  modified_base (15)..(15): 2'-O-methyladenosine
  modified_base (16)..(16): 2'-deoxy-2'-fluoroguanosine
  modified_base (17)..(17): cm
  modified_base (18)..(18): 2'-deoxy-2'-fluoroadenosine
  modified_base (19)..(19): cm
  modified_base (20)..(20): 2'-deoxy-2'-fluorouridine
  modified_base (21)..(21): gm
  modified_base (22)..(22): 2'-deoxy-2'-fluoroguanosine
  misc_feature (22)..(23): 5'-phosphonothioate
  modified_base (23)..(23): 2'-O-methyladenosine
ucgagaacaagaugagcacugga

SEQ ID NO: 6144 - RNA, 23 nt, Artificial Sequence
  siRNA antisense strand against b2GPI
  modified_base (1)..(1): 2'-deoxy-2'-fluorocytidine
  modified_base (2)..(2): um
  misc_feature (2)..(3): 5'-phosphonothioate
  modified_base (3)..(3): 2'-deoxy-2'-fluorocytidine
  modified_base (4)..(4): gm
  modified_base (5)..(5): 2'-deoxy-2'-fluoroadenosine
  modified_base (6)..(6): gm
  modified_base (7)..(7): 2'-deoxy-2'-fluoroadenosine
  modified_base (8)..(8): 2'-O-methyladenosine
  modified_base (9)..(9): 2'-deoxy-2'-fluorocytidine
  modified_base (10)..(10): 2'-O-methyladenosine
  modified_base (11)..(11): 2'-O-methyladenosine
  modified_base (12)..(12): 2'-deoxy-2'-fluoroguanosine
  modified_base (13)..(13): 2'-O-methyladenosine
  modified_base (14)..(14): 2'-deoxy-2'-fluorouridine
  modified_base (15)..(15): gm
  modified_base (16)..(16): 2'-deoxy-2'-fluoroadenosine
  modified_base (17)..(17): gm
  modified_base (18)..(18): 2'-deoxy-2'-fluorocytidine
  modified_base (19)..(19): 2'-O-methyladenosine
  modified_base (20)..(20): 2'-deoxy-2'-fluorocytidine
  modified_base (21)..(21): um
  modified_base (22)..(22): 2'-deoxy-2'-fluoroguanosine
  misc_feature (22)..(23): 5'-phosphonothioate
  modified_base (23)..(23): gm
cucgagaacaagaugagcacugg

SEQ ID NO: 6145 - RNA, 23 nt, Artificial Sequence
  siRNA antisense strand against b2GPI
  modified_base (1)..(1): 2'-deoxy-2'-fluoroadenosine
  modified_base (2)..(2): cm
  misc_feature (2)..(3): 5'-phosphonothioate
  modified_base (3)..(3): 2'-deoxy-2'-fluorouridine
  modified_base (4)..(4): cm
  modified_base (5)..(5): 2'-deoxy-2'-fluoroguanosine
  modified_base (6)..(6): 2'-O-methyladenosine
  modified_base (7)..(7): 2'-deoxy-2'-fluoroguanosine
  modified_base (8)..(8): 2'-O-methyladenosine
  modified_base (9)..(9): 2'-deoxy-2'-fluoroadenosine
  modified_base (10)..(10): cm
  modified_base (11)..(11): 2'-O-methyladenosine
  modified_base (12)..(12): 2'-deoxy-2'-fluoroadenosine
  modified_base (13)..(13): gm
  modified_base (14)..(14): 2'-deoxy-2'-fluoroadenosine
  modified_base (15)..(15): um
  modified_base (16)..(16): 2'-deoxy-2'-fluoroguanosine
  modified_base (17)..(17): 2'-O-methyladenosine
  modified_base (18)..(18): 2'-deoxy-2'-fluoroguanosine
  modified_base (19)..(19): cm
  modified_base (20)..(20): 2'-deoxy-2'-fluoroadenosine
  modified_base (21)..(21): cm
  modified_base (22)..(22): 2'-deoxy-2'-fluorouridine
  misc_feature (22)..(23): 5'-phosphonothioate
  modified_base (23)..(23): gm
acucgagaacaagaugagcacug

SEQ ID NO: 6146 - RNA, 23 nt, Artificial Sequence
  siRNA antisense strand against b2GPI
  modified_base (1)..(1): 2'-deoxy-2'-fluoroadenosine
  modified_base (2)..(2): 2'-O-methyladenosine
  misc_feature (2)..(3): 5'-phosphonothioate
  modified_base (3)..(3): 2'-deoxy-2'-fluorocytidine
  modified_base (4)..(4): um
  modified_base (5)..(5): 2'-deoxy-2'-fluorocytidine
  modified_base (6)..(6): gm
  modified_base (7)..(7): 2'-deoxy-2'-fluoroadenosine
  modified_base (8)..(8): gm
  modified_base (9)..(9): 2'-deoxy-2'-fluoroadenosine
  modified_base (10)..(10): 2'-O-methyladenosine
  modified_base (11)..(11): cm
  modified_base (12)..(12): 2'-deoxy-2'-fluoroadenosine
  modified_base (13)..(13): 2'-O-methyladenosine
  modified_base (14)..(14): 2'-deoxy-2'-fluoroguanosine
  modified_base (15)..(15): 2'-O-methyladenosine
  modified_base (16)..(16): 2'-deoxy-2'-fluorouridine
  modified_base (17)..(17): gm
  modified_base (18)..(18): 2'-deoxy-2'-fluoroadenosine
  modified_base (19)..(19): gm
  modified_base (20)..(20): 2'-deoxy-2'-fluorocytidine
  modified_base (21)..(21): 2'-O-methyladenosine
  modified_base (22)..(22): 2'-deoxy-2'-fluorocytidine
  misc_feature (22)..(23): 5'-phosphonothioate
  modified_base (23)..(23): um
aacucgagaacaagaugagcacu

SEQ ID NO: 6147 - RNA, 23 nt, Artificial Sequence
  siRNA antisense strand against b2GPI
  modified_base (1)..(1): 2'-deoxy-2'-fluoroadenosine
  modified_base (2)..(2): 2'-O-methyladenosine
  misc_feature (2)..(3): 5'-phosphonothioate
  modified_base (3)..(3): 2'-deoxy-2'-fluoroadenosine
  modified_base (4)..(4): cm
  modified_base (5)..(5): 2'-deoxy-2'-fluorouridine
  modified_base (6)..(6): cm
  modified_base (7)..(7): 2'-deoxy-2'-fluoroguanosine
  modified_base (8)..(8): 2'-O-methyladenosine
  modified_base (9)..(9): 2'-deoxy-2'-fluoroguanosine
  modified_base (10)..(10): 2'-O-methyladenosine
  modified_base (11)..(11): 2'-O-methyladenosine
  modified_base (12)..(12): 2'-deoxy-2'-fluorocytidine
  modified_base (13)..(13): 2'-O-methyladenosine
  modified_base (14)..(14): 2'-deoxy-2'-fluoroadenosine
  modified_base (15)..(15): gm
  modified_base (16)..(16): 2'-deoxy-2'-fluoroadenosine
  modified_base (17)..(17): um
  modified_base (18)..(18): 2'-deoxy-2'-fluoroguanosine
  modified_base (19)..(19): 2'-O-methyladenosine
  modified_base (20)..(20): 2'-deoxy-2'-fluoroguanosine
  modified_base (21)..(21): cm
  modified_base (22)..(22): 2'-deoxy-2'-fluoroadenosine
  misc_feature (22)..(23): 5'-phosphonothioate
  modified_base (23)..(23): cm
aaacucgagaacaagaugagcac

SEQ ID NO: 6148 - RNA, 23 nt, Artificial Sequence
  siRNA antisense strand against b2GPI
  modified_base (1)..(1): 2'-deoxy-2'-fluoroadenosine
  modified_base (2)..(2): 2'-O-methyladenosine
  misc_feature (2)..(3): 5'-phosphonothioate
  modified_base (3)..(3): 2'-deoxy-2'-fluoroadenosine
  modified_base (4)..(4): 2'-O-methyladenosine
  modified_base (5)..(5): 2'-deoxy-2'-fluorocytidine
  modified_base (6)..(6): um
  modified_base (7)..(7): 2'-deoxy-2'-fluorocytidine
  modified_base (8)..(8): gm
  modified_base (9)..(9): 2'-deoxy-2'-fluoroadenosine
  modified_base (10)..(10): gm
  modified_base (11)..(11): 2'-O-methyladenosine
  modified_base (12)..(12): 2'-deoxy-2'-fluoroadenosine
  modified_base (13)..(13): cm
  modified_base (14)..(14): 2'-deoxy-2'-fluoroadenosine
  modified_base (15)..(15): 2'-O-methyladenosine
  modified_base (16)..(16): 2'-deoxy-2'-fluoroguanosine
  modified_base (17)..(17): 2'-O-methyladenosine
  modified_base (18)..(18): 2'-deoxy-2'-fluorouridine
  modified_base (19)..(19): gm
  modified_base (20)..(20): 2'-deoxy-2'-fluoroadenosine
  modified_base (21)..(21): gm
  modified_base (22)..(22): 2'-deoxy-2'-fluorocytidine
  misc_feature (22)..(23): 5'-phosphonothioate
  modified_base (23)..(23): 2'-O-methyladenosine
aaaacucgagaacaagaugagca

SEQ ID NO: 6149 - RNA, 23 nt, Artificial Sequence
  siRNA antisense strand against b2GPI
  modified_base (1)..(1): 2'-deoxy-2'-fluoroguanosine
  modified_base (2)..(2): 2'-O-methyladenosine
  misc_feature (2)..(3): 5'-phosphonothioate
  modified_base (3)..(3): 2'-deoxy-2'-fluoroadenosine
  modified_base (4)..(4): 2'-O-methyladenosine
  modified_base (5)..(5): 2'-deoxy-2'-fluoroadenosine
  modified_base (6)..(6): cm
  modified_base (7)..(7): 2'-deoxy-2'-fluorouridine
  modified_base (8)..(8): cm
  modified_base (9)..(9): 2'-deoxy-2'-fluoroguanosine
  modified_base (10)..(10): 2'-O-methyladenosine
  modified_base (11)..(11): gm
  modified_base (12)..(12): 2'-deoxy-2'-fluoroadenosine
  modified_base (13)..(13): 2'-O-methyladenosine
  modified_base (14)..(14): 2'-deoxy-2'-fluorocytidine
  modified_base (15)..(15): 2'-O-methyladenosine
  modified_base (16)..(16): 2'-deoxy-2'-fluoroadenosine
  modified_base (17)..(17): gm
  modified_base (18)..(18): 2'-deoxy-2'-fluoroadenosine
  modified_base (19)..(19): um
  modified_base (20)..(20): 2'-deoxy-2'-fluoroguanosine
  modified_base (21)..(21): 2'-O-methyladenosine
  modified_base (22)..(22): 2'-deoxy-2'-fluoroguanosine
  misc_feature (22)..(23): 5'-phosphonothioate
  modified_base (23)..(23): cm
gaaaacucgagaacaagaugagc

SEQ ID NO: 6150 - RNA, 23 nt, Artificial Sequence
  siRNA antisense strand against b2GPI
  modified_base (1)..(1): 2'-deoxy-2'-fluoroadenosine
  modified_base (2)..(2): gm
  misc_feature (2)..(3): 5'-phosphonothioate
  modified_base (3)..(3): 2'-deoxy-2'-fluoroadenosine
  modified_base (4)..(4): 2'-O-methyladenosine
  modified_base (5)..(5): 2'-deoxy-2'-fluoroadenosine
  modified_base (6)..(6): 2'-O-methyladenosine
  modified_base (7)..(7): 2'-deoxy-2'-fluorocytidine
  modified_base (8)..(8): um
  modified_base (9)..(9): 2'-deoxy-2'-fluorocytidine
  modified_base (10)..(10): gm
  modified_base (11)..(11): 2'-O-methyladenosine
  modified_base (12)..(12): 2'-deoxy-2'-fluoroguanosine
  modified_base (13)..(13): 2'-O-methyladenosine
  modified_base (14)..(14): 2'-deoxy-2'-fluoroadenosine
  modified_base (15)..(15): cm
  modified_base (16)..(16): 2'-deoxy-2'-fluoroadenosine
  modified_base (17)..(17): 2'-O-methyladenosine
  modified_base (18)..(18): 2'-deoxy-2'-fluoroguanosine
  modified_base (19)..(19): 2'-O-methyladenosine
  modified_base (20)..(20): 2'-deoxy-2'-fluorouridine
  modified_base (21)..(21): gm
  modified_base (22)..(22): 2'-deoxy-2'-fluoroadenosine
  misc_feature (22)..(23): 5'-phosphonothioate
  modified_base (23)..(23): gm
agaaaacucgagaacaagaugag

SEQ ID NO: 6151 - RNA, 23 nt, Artificial Sequence
  siRNA antisense strand against b2GPI
  modified_base (1)..(1): 2'-deoxy-2'-fluoroguanosine
  modified_base (2)..(2): 2'-O-methyladenosine
  misc_feature (2)..(3): 5'-phosphonothioate
  modified_base (3)..(3): 2'-deoxy-2'-fluoroguanosine
  modified_base (4)..(4): 2'-O-methyladenosine
  modified_base (5)..(5): 2'-deoxy-2'-fluoroadenosine
  modified_base (6)..(6): 2'-O-methyladenosine
  modified_base (7)..(7): 2'-deoxy-2'-fluoroadenosine
  modified_base (8)..(8): cm
  modified_base (9)..(9): 2'-deoxy-2'-fluorouridine
  modified_base (10)..(10): cm
  modified_base (11)..(11): gm
  modified_base (12)..(12): 2'-deoxy-2'-fluoroadenosine
  modified_base (13)..(13): gm
  modified_base (14)..(14): 2'-deoxy-2'-fluoroadenosine
  modified_base (15)..(15): 2'-O-methyladenosine
  modified_base (16)..(16): 2'-deoxy-2'-fluorocytidine
  modified_base (17)..(17): 2'-O-methyladenosine
  modified_base (18)..(18): 2'-deoxy-2'-fluoroadenosine
  modified_base (19)..(19): gm
  modified_base (20)..(20): 2'-deoxy-2'-fluoroadenosine
  modified_base (21)..(21): um
  modified_base (22)..(22): 2'-deoxy-2'-fluoroguanosine
  misc_feature (22)..(23): 5'-phosphonothioate
  modified_base (23)..(23): 2'-O-methyladenosine
gagaaaacucgagaacaagauga

SEQ ID NO: 6152 - RNA, 23 nt, Artificial Sequence
  siRNA antisense strand against b2GPI
  modified_base (1)..(1): 2'-deoxy-2'-fluoroadenosine
  modified_base (2)..(2): gm
  misc_feature (2)..(3): 5'-phosphonothioate
  modified_base (3)..(3): 2'-deoxy-2'-fluoroadenosine
  modified_base (4)..(4): gm
  modified_base (5)..(5): 2'-deoxy-2'-fluoroadenosine
  modified_base (6)..(6): 2'-O-methyladenosine
  modified_base (7)..(7): 2'-deoxy-2'-fluoroadenosine
  modified_base (8)..(8): 2'-O-methyladenosine
  modified_base (9)..(9): 2'-deoxy-2'-fluorocytidine
  modified_base (10)..(10): um
  modified_base (11)..(11): cm
  modified_base (12)..(12): 2'-deoxy-2'-fluoroguanosine
  modified_base (13)..(13): 2'-O-methyladenosine
  modified_base (14)..(14): 2'-deoxy-2'-fluoroguanosine
  modified_base (15)..(15): 2'-O-methyladenosine
  modified_base (16)..(16): 2'-deoxy-2'-fluoroadenosine
  modified_base (17)..(17): cm
  modified_base (18)..(18): 2'-deoxy-2'-fluoroadenosine
  modified_base (19)..(19): 2'-O-methyladenosine
  modified_base (20)..(20): 2'-deoxy-2'-fluoroguanosine
  modified_base (21)..(21): 2'-O-methyladenosine
  modified_base (22)..(22): 2'-deoxy-2'-fluorouridine
  misc_feature (22)..(23): 5'-phosphonothioate
  modified_base (23)..(23): gm
agagaaaacucgagaacaagaug

SEQ ID NO: 6153 - RNA, 23 nt, Artificial Sequence
  siRNA antisense strand against b2GPI
  modified_base (1)..(1): 2'-deoxy-2'-fluorocytidine
  modified_base (2)..(2): 2'-O-methyladenosine
  misc_feature (2)..(3): 5'-phosphonothioate
  modified_base (3)..(3): 2'-deoxy-2'-fluoroguanosine
  modified_base (4)..(4): 2'-O-methyladenosine
  modified_base (5)..(5): 2'-deoxy-2'-fluoroguanosine
  modified_base (6)..(6): 2'-O-methyladenosine
  modified_base (7)..(7): 2'-deoxy-2'-fluoroadenosine
  modified_base (8)..(8): 2'-O-methyladenosine
  modified_base (9)..(9): 2'-deoxy-2'-fluoroadenosine
  modified_base (10)..(10): cm
  modified_base (11)..(11): um
  modified_base (12)..(12): 2'-deoxy-2'-fluorocytidine
  modified_base (13)..(13): gm
  modified_base (14)..(14): 2'-deoxy-2'-fluoroadenosine
  modified_base (15)..(15): gm
  modified_base (16)..(16): 2'-deoxy-2'-fluoroadenosine
  modified_base (17)..(17): 2'-O-methyladenosine
  modified_base (18)..(18): 2'-deoxy-2'-fluorocytidine
  modified_base (19)..(19): 2'-O-methyladenosine
  modified_base (20)..(20): 2'-deoxy-2'-fluoroadenosine
  modified_base (21)..(21): gm
  modified_base (22)..(22): 2'-deoxy-2'-fluoroadenosine
  misc_feature (22)..(23): 5'-phosphonothioate
  modified_base (23)..(23): um
cagagaaaacucgagaacaagau

SEQ ID NO: 6154 - RNA, 23 nt, Artificial Sequence
  siRNA antisense strand against b2GPI
  modified_base (1)..(1): 2'-deoxy-2'-fluoroguanosine
  modified_base (2)..(2): cm
  misc_feature (2)..(3): 5'-phosphonothioate
  modified_base (3)..(3): 2'-deoxy-2'-fluoroadenosine
  modified_base (4)..(4): gm
  modified_base (5)..(5): 2'-deoxy-2'-fluoroadenosine
  modified_base (6)..(6): gm
  modified_base (7)..(7): 2'-deoxy-2'-fluoroadenosine
  modified_base (8)..(8): 2'-O-methyladenosine
  modified_base (9)..(9): 2'-deoxy-2'-fluoroadenosine
  modified_base (10)..(10): 2'-O-methyladenosine
  modified_base (11)..(11): cm
  modified_base (12)..(12): 2'-deoxy-2'-fluorouridine
  modified_base (13)..(13): cm
  modified_base (14)..(14): 2'-deoxy-2'-fluoroguanosine
  modified_base (15)..(15): 2'-O-methyladenosine
  modified_base (16)..(16): 2'-deoxy-2'-fluoroguanosine
  modified_base (17)..(17): 2'-O-methyladenosine
  modified_base (18)..(18): 2'-deoxy-2'-fluoroadenosine
  modified_base (19)..(19): cm
  modified_base (20)..(20): 2'-deoxy-2'-fluoroadenosine
  modified_base (21)..(21): 2'-O-methyladenosine
  modified_base (22)..(22): 2'-deoxy-2'-fluoroguanosine
  misc_feature (22)..(23): 5'-phosphonothioate
  modified_base (23)..(23): 2'-O-methyladenosine
gcagagaaaacucgagaacaaga

SEQ ID NO: 6155 - RNA, 23 nt, Artificial Sequence
  siRNA antisense strand against b2GPI
  modified_base (1)..(1): 2'-deoxy-2'-fluorouridine
  modified_base (2)..(2): gm
  misc_feature (2)..(3): 5'-phosphonothioate
  modified_base (3)..(3): 2'-deoxy-2'-fluoroguanosine
  modified_base (4)..(4): cm
  modified_base (5)..(5): 2'-deoxy-2'-fluoroadenosine
  modified_base (6)..(6): gm
  modified_base (7)..(7): 2'-deoxy-2'-fluoroadenosine
  modified_base (8)..(8): gm
  modified_base (9)..(9): 2'-deoxy-2'-fluoroadenosine
  modified_base (10)..(10): 2'-O-methyladenosine
  modified_base (11)..(11): 2'-O-methyladenosine
  modified_base (12)..(12): 2'-deoxy-2'-fluoroadenosine
  modified_base (13)..(13): cm
  modified_base (14)..(14): 2'-deoxy-2'-fluorouridine
  modified_base (15)..(15): cm
  modified_base (16)..(16): 2'-deoxy-2'-fluoroguanosine
  modified_base (17)..(17): 2'-O-methyladenosine
  modified_base (18)..(18): 2'-deoxy-2'-fluoroguanosine
  modified_base (19)..(19): 2'-O-methyladenosine
  modified_base (20)..(20): 2'-deoxy-2'-fluoroadenosine
  modified_base (21)..(21): cm
  modified_base (22)..(22): 2'-deoxy-2'-fluoroadenosine
  misc_feature (22)..(23): 5'-phosphonothioate
  modified_base (23)..(23): 2'-O-methyladenosine
uggcagagaaaacucgagaacaa

SEQ ID NO: 6156 - RNA, 23 nt, Artificial Sequence
  siRNA antisense strand against b2GPI
  modified_base (1)..(1): 2'-deoxy-2'-fluoroadenosine
  modified_base (2)..(2): um
  misc_feature (2)..(3): 5'-phosphonothioate
  modified_base (3)..(3): 2'-deoxy-2'-fluoroguanosine
  modified_base (4)..(4): gm
  modified_base (5)..(5): 2'-deoxy-2'-fluorocytidine
  modified_base (6)..(6): 2'-O-methyladenosine
  modified_base (7)..(7): 2'-deoxy-2'-fluoroguanosine
  modified_base (8)..(8): 2'-O-methyladenosine
  modified_base (9)..(9): 2'-deoxy-2'-fluoroguanosine
  modified_base (10)..(10): 2'-O-methyladenosine
  modified_base (11)..(11): 2'-O-methyladenosine
  modified_base (12)..(12): 2'-deoxy-2'-fluoroadenosine
  modified_base (13)..(13): 2'-O-methyladenosine
  modified_base (14)..(14): 2'-deoxy-2'-fluorocytidine
  modified_base (15)..(15): um
  modified_base (16)..(16): 2'-deoxy-2'-fluorocytidine
  modified_base (17)..(17): gm
  modified_base (18)..(18): 2'-deoxy-2'-fluoroadenosine
  modified_base (19)..(19): gm
  modified_base (20)..(20): 2'-deoxy-2'-fluoroadenosine
  modified_base (21)..(21): 2'-O-methyladenosine
  modified_base (22)..(22): 2'-deoxy-2'-fluorocytidine
  misc_feature (22)..(23): 5'-phosphonothioate
  modified_base (23)..(23): 2'-O-methyladenosine
auggcagagaaaacucgagaaca

SEQ ID NO: 6157 - RNA, 23 nt, Artificial Sequence
  siRNA antisense strand against b2GPI
  modified_base (1)..(1): 2'-deoxy-2'-fluorocytidine
  modified_base (2)..(2): 2'-O-methyladenosine
  misc_feature (2)..(3): 5'-phosphonothioate
  modified_base (3)..(3): 2'-deoxy-2'-fluorouridine
  modified_base (4)..(4): gm
  modified_base (5)..(5): 2'-deoxy-2'-fluoroguanosine
  modified_base (6)..(6): cm
  modified_base (7)..(7): 2'-deoxy-2'-fluoroadenosine
  modified_base (8)..(8): gm
  modified_base (9)..(9): 2'-deoxy-2'-fluoroadenosine
  modified_base (10)..(10): gm
  modified_base (11)..(11): 2'-O-methyladenosine
  modified_base (12)..(12): 2'-deoxy-2'-fluoroadenosine
  modified_base (13)..(13): 2'-O-methyladenosine
  modified_base (14)..(14): 2'-deoxy-2'-fluoroadenosine
  modified_base (15)..(15): cm
  modified_base (16)..(16): 2'-deoxy-2'-fluorouridine
  modified_base (17)..(17): cm
  modified_base (18)..(18): 2'-deoxy-2'-fluoroguanosine
  modified_base (19)..(19): 2'-O-methyladenosine
  modified_base (20)..(20): 2'-deoxy-2'-fluoroguanosine
  modified_base (21)..(21): 2'-O-methyladenosine
  modified_base (22)..(22): 2'-deoxy-2'-fluoroadenosine
  misc_feature (22)..(23): 5'-phosphonothioate
  modified_base (23)..(23): cm
cauggcagagaaaacucgagaac

SEQ ID NO: 6158 - RNA, 23 nt, Artificial Sequence
  siRNA antisense strand against b2GPI
  modified_base (1)..(1): 2'-deoxy-2'-fluoroadenosine
  modified_base (2)..(2): cm
  misc_feature (2)..(3): 5'-phosphonothioate
  modified_base (3)..(3): 2'-deoxy-2'-fluoroadenosine
  modified_base (4)..(4): um
  modified_base (5)..(5): 2'-deoxy-2'-fluoroguanosine
  modified_base (6)..(6): gm
  modified_base (7)..(7): 2'-deoxy-2'-fluorocytidine
  modified_base (8)..(8): 2'-O-methyladenosine
  modified_base (9)..(9): 2'-deoxy-2'-fluoroguanosine
  modified_base (10)..(10): 2'-O-methyladenosine
  modified_base (11)..(11): gm
  modified_base (12)..(12): 2'-deoxy-2'-fluoroadenosine
  modified_base (13)..(13): 2'-O-methyladenosine
  modified_base (14)..(14): 2'-deoxy-2'-fluoroadenosine
  modified_base (15)..(15): 2'-O-methyladenosine
  modified_base (16)..(16): 2'-deoxy-2'-fluorocytidine
  modified_base (17)..(17): um
  modified_base (18)..(18): 2'-deoxy-2'-fluorocytidine
  modified_base (19)..(19): gm
  modified_base (20)..(20): 2'-deoxy-2'-fluoroadenosine
  modified_base (21)..(21): gm
  modified_base (22)..(22): 2'-deoxy-2'-fluoroadenosine
  misc_feature (22)..(23): 5'-phosphonothioate
  modified_base (23)..(23): 2'-O-methyladenosine
acauggcagagaaaacucgagaa

SEQ ID NO: 6159 - RNA, 23 nt, Artificial Sequence
  siRNA antisense strand against b2GPI
  modified_base (1)..(1): 2'-deoxy-2'-fluoroadenosine
  modified_base (2)..(2): 2'-O-methyladenosine
  misc_feature (2)..(3): 5'-phosphonothioate
  modified_base (3)..(3): 2'-deoxy-2'-fluorocytidine
  modified_base (4)..(4): 2'-O-methyladenosine
  modified_base (5)..(5): 2'-deoxy-2'-fluorouridine
  modified_base (6)..(6): gm
  modified_base (7)..(7): 2'-deoxy-2'-fluoroguanosine
  modified_base (8)..(8): cm
  modified_base (9)..(9): 2'-deoxy-2'-fluoroadenosine
  modified_base (10)..(10): gm
  modified_base (11)..(11): 2'-O-methyladenosine
  modified_base (12)..(12): 2'-deoxy-2'-fluoroguanosine
  modified_base (13)..(13): 2'-O-methyladenosine
  modified_base (14)..(14): 2'-deoxy-2'-fluoroadenosine
  modified_base (15)..(15): 2'-O-methyladenosine
  modified_base (16)..(16): 2'-deoxy-2'-fluoroadenosine
  modified_base (17)..(17): cm
  modified_base (18)..(18): 2'-deoxy-2'-fluorouridine
  modified_base (19)..(19): cm
  modified_base (20)..(20): 2'-deoxy-2'-fluoroguanosine
  modified_base (21)..(21): 2'-O-methyladenosine
  modified_base (22)..(22): 2'-deoxy-2'-fluoroguanosine
  misc_feature (22)..(23): 5'-phosphonothioate
  modified_base (23)..(23): 2'-O-methyladenosine
aacauggcagagaaaacucgaga

SEQ ID NO: 6160 - RNA, 23 nt, Artificial Sequence
  siRNA antisense strand against b2GPI
  modified_base (1)..(1): 2'-deoxy-2'-fluorocytidine
  modified_base (2)..(2): 2'-O-methyladenosine
  misc_feature (2)..(3): 5'-phosphonothioate
  modified_base (3)..(3): 2'-deoxy-2'-fluoroadenosine
  modified_base (4)..(4): cm
  modified_base (5)..(5): 2'-deoxy-2'-fluoroadenosine
  modified_base (6)..(6): um
  modified_base (7)..(7): 2'-deoxy-2'-fluoroguanosine
  modified_base (8)..(8): gm
  modified_base (9)..(9): 2'-deoxy-2'-fluorocytidine
  modified_base (10)..(10): 2'-O-methyladenosine
  modified_base (11)..(11): gm
  modified_base (12)..(12): 2'-deoxy-2'-fluoroadenosine
  modified_base (13)..(13): gm
  modified_base (14)..(14): 2'-deoxy-2'-fluoroadenosine
  modified_base (15)..(15): 2'-O-methyladenosine
  modified_base (16)..(16): 2'-deoxy-2'-fluoroadenosine
  modified_base (17)..(17): 2'-O-methyladenosine
  modified_base (18)..(18): 2'-deoxy-2'-fluorocytidine
  modified_base (19)..(19): um
  modified_base (20)..(20): 2'-deoxy-2'-fluorocytidine
  modified_base (21)..(21): gm
  modified_base (22)..(22): 2'-deoxy-2'-fluoroadenosine
  misc_feature (22)..(23): 5'-phosphonothioate
  modified_base (23)..(23): gm
caacauggcagagaaaacucgag

SEQ ID NO: 6161 - RNA, 23 nt, Artificial Sequence
  siRNA antisense strand against b2GPI
  modified_base (1)..(1): 2'-deoxy-2'-fluoroguanosine
  modified_base (2)..(2): cm
  misc_feature (2)..(3): 5'-phosphonothioate
  modified_base (3)..(3): 2'-deoxy-2'-fluoroadenosine
  modified_base (4)..(4): 2'-O-methyladenosine
  modified_base (5)..(5): 2'-deoxy-2'-fluorocytidine
  modified_base (6)..(6): 2'-O-methyladenosine
  modified_base (7)..(7): 2'-deoxy-2'-fluorouridine
  modified_base (8)..(8): gm
  modified_base (9)..(9): 2'-deoxy-2'-fluoroguanosine
  modified_base (10)..(10): cm
  modified_base (11)..(11): 2'-O-methyladenosine
  modified_base (12)..(12): 2'-deoxy-2'-fluoroguanosine
  modified_base (13)..(13): 2'-O-methyladenosine
  modified_base (14)..(14): 2'-deoxy-2'-fluoroguanosine
  modified_base (15)..(15): 2'-O-methyladenosine
  modified_base (16)..(16): 2'-deoxy-2'-fluoroadenosine
  modified_base (17)..(17): 2'-O-methyladenosine
  modified_base (18)..(18): 2'-deoxy-2'-fluoroadenosine
  modified_base (19)..(19): cm
  modified_base (20)..(20): 2'-deoxy-2'-fluorouridine
  modified_base (21)..(21): cm
  modified_base (22)..(22): 2'-deoxy-2'-fluoroguanosine
  misc_feature (22)..(23): 5'-phosphonothioate
  modified_base (23)..(23): 2'-O-methyladenosine
gcaacauggcagagaaaacucga

SEQ ID NO: 6162 - RNA, 23 nt, Artificial Sequence
  siRNA antisense strand against b2GPI
  modified_base (1)..(1): 2'-deoxy-2'-fluoroadenosine
  modified_base (2)..(2): gm
  misc_feature (2)..(3): 5'-phosphonothioate
  modified_base (3)..(3): 2'-deoxy-2'-fluorocytidine
  modified_base (4)..(4): 2'-O-methyladenosine
  modified_base (5)..(5): 2'-deoxy-2'-fluoroadenosine
  modified_base (6)..(6): cm
  modified_base (7)..(7): 2'-deoxy-2'-fluoroadenosine
  modified_base (8)..(8): um
  modified_base (9)..(9): 2'-deoxy-2'-fluoroguanosine
  modified_base (10)..(10): gm
  modified_base (11)..(11): cm
  modified_base (12)..(12): 2'-deoxy-2'-fluoroadenosine
  modified_base (13)..(13): gm
  modified_base (14)..(14): 2'-deoxy-2'-fluoroadenosine
  modified_base (15)..(15): gm
  modified_base (16)..(16): 2'-deoxy-2'-fluoroadenosine
  modified_base (17)..(17): 2'-O-methyladenosine
  modified_base (18)..(18): 2'-deoxy-2'-fluoroadenosine
  modified_base (19)..(19): 2'-O-methyladenosine
  modified_base (20)..(20): 2'-deoxy-2'-fluorocytidine
  modified_base (21)..(21): um
  modified_base (22)..(22): 2'-deoxy-2'-fluorocytidine
  misc_feature (22)..(23): 5'-phosphonothioate
  modified_base (23)..(23): gm
agcaacauggcagagaaaacucg

SEQ ID NO: 6163 - RNA, 23 nt, Artificial Sequence
  siRNA antisense strand against b2GPI
  modified_base (1)..(1): 2'-deoxy-2'-fluorouridine
  modified_base (2)..(2): 2'-O-methyladenosine
  misc_feature (2)..(3): 5'-phosphonothioate
  modified_base (3)..(3): 2'-deoxy-2'-fluoroguanosine
  modified_base (4)..(4): cm
  modified_base (5)..(5): 2'-deoxy-2'-fluoroadenosine
  modified_base (6)..(6): 2'-O-methyladenosine
  modified_base (7)..(7): 2'-deoxy-2'-fluorocytidine
  modified_base (8)..(8): 2'-O-methyladenosine
  modified_base (9)..(9): 2'-deoxy-2'-fluorouridine
  modified_base (10)..(10): gm
  modified_base (11)..(11): gm
  modified_base (12)..(12): 2'-deoxy-2'-fluorocytidine
  modified_base (13)..(13): 2'-O-methyladenosine
  modified_base (14)..(14): 2'-deoxy-2'-fluoroguanosine
  modified_base (15)..(15): 2'-O-methyladenosine
  modified_base (16)..(16): 2'-deoxy-2'-fluoroguanosine
  modified_base (17)..(17): 2'-O-methyladenosine
  modified_base (18)..(18): 2'-deoxy-2'-fluoroadenosine
  modified_base (19)..(19): 2'-O-methyladenosine
  modified_base (20)..(20): 2'-deoxy-2'-fluoroadenosine
  modified_base (21)..(21): cm
  modified_base (22)..(22): 2'-deoxy-2'-fluorouridine
  misc_feature (22)..(23): 5'-phosphonothioate
  modified_base (23)..(23): cm
uagcaacauggcagagaaaacuc

SEQ ID NO: 6164 - RNA, 23 nt, Artificial Sequence
  siRNA antisense strand against b2GPI
  modified_base (1)..(1): 2'-deoxy-2'-fluoroadenosine
  modified_base (2)..(2): um
  misc_feature (2)..(3): 5'-phosphonothioate
  modified_base (3)..(3): 2'-deoxy-2'-fluoroadenosine
  modified_base (4)..(4): gm
  modified_base (5)..(5): 2'-deoxy-2'-fluorocytidine
  modified_base (6)..(6): 2'-O-methyladenosine
  modified_base (7)..(7): 2'-deoxy-2'-fluoroadenosine
  modified_base (8)..(8): cm
  modified_base (9)..(9): 2'-deoxy-2'-fluoroadenosine
  modified_base (10)..(10): um
  modified_base (11)..(11): gm
  modified_base (12)..(12): 2'-deoxy-2'-fluoroguanosine
  modified_base (13)..(13): cm
  modified_base (14)..(14): 2'-deoxy-2'-fluoroadenosine
  modified_base (15)..(15): gm
  modified_base (16)..(16): 2'-deoxy-2'-fluoroadenosine
  modified_base (17)..(17): gm
  modified_base (18)..(18): 2'-deoxy-2'-fluoroadenosine
  modified_base (19)..(19): 2'-O-methyladenosine
  modified_base (20)..(20): 2'-deoxy-2'-fluoroadenosine
  modified_base (21)..(21): 2'-O-methyladenosine
  modified_base (22)..(22): 2'-deoxy-2'-fluorocytidine
  misc_feature (22)..(23): 5'-phosphonothioate
  modified_base (23)..(23): um
auagcaacauggcagagaaaacu

SEQ ID NO: 6165 - RNA, 23 nt, Artificial Sequence
  siRNA antisense strand against b2GPI
  modified_base (1)..(1): 2'-deoxy-2'-fluoroadenosine
  modified_base (2)..(2): 2'-O-methyladenosine
  misc_feature (2)..(3): 5'-phosphonothioate
  modified_base (3)..(3): 2'-deoxy-2'-fluorouridine
  modified_base (4)..(4): 2'-O-methyladenosine
  modified_base (5)..(5): 2'-deoxy-2'-fluoroguanosine
  modified_base (6)..(6): cm
  modified_base (7)..(7): 2'-deoxy-2'-fluoroadenosine
  modified_base (8)..(8): 2'-O-methyladenosine
  modified_base (9)..(9): 2'-deoxy-2'-fluorocytidine
  modified_base (10)..(10): 2'-O-methyladenosine
  modified_base (11)..(11): um
  modified_base (12)..(12): 2'-deoxy-2'-fluoroguanosine
  modified_base (13)..(13): gm
  modified_base (14)..(14): 2'-deoxy-2'-fluorocytidine
  modified_base (15)..(15): 2'-O-methyladenosine
  modified_base (16)..(16): 2'-deoxy-2'-fluoroguanosine
  modified_base (17)..(17): 2'-O-methyladenosine
  modified_base (18)..(18): 2'-deoxy-2'-fluoroguanosine
  modified_base (19)..(19): 2'-O-methyladenosine
  modified_base (20)..(20): 2'-deoxy-2'-fluoroadenosine
  modified_base (21)..(21): 2'-O-methyladenosine
  modified_base (22)..(22): 2'-deoxy-2'-fluoroadenosine
  misc_feature (22)..(23): 5'-phosphonothioate
  modified_base (23)..(23): cm
aauagcaacauggcagagaaaac

SEQ ID NO: 6166 - RNA, 23 nt, Artificial Sequence
  siRNA antisense strand against b2GPI
  modified_base (1)..(1): 2'-deoxy-2'-fluorouridine
  modified_base (2)..(2): gm
  misc_feature (2)..(3): 5'-phosphonothioate
  modified_base (3)..(3): 2'-deoxy-2'-fluorocytidine
  modified_base (4)..(4): 2'-O-methyladenosine
  modified_base (5)..(5): 2'-deoxy-2'-fluoroadenosine
  modified_base (6)..(6): um
  modified_base (7)..(7): 2'-deoxy-2'-fluoroadenosine
  modified_base (8)..(8): gm
  modified_base (9)..(9): 2'-deoxy-2'-fluorocytidine
  modified_base (10)..(10): 2'-O-methyladenosine
  modified_base (11)..(11): 2'-O-methyladenosine
  modified_base (12)..(12): 2'-deoxy-2'-fluorocytidine
  modified_base (13)..(13): 2'-O-methyladenosine
  modified_base (14)..(14): 2'-deoxy-2'-fluorouridine
  modified_base (15)..(15): gm
  modified_base (16)..(16): 2'-deoxy-2'-fluoroguanosine
  modified_base (17)..(17): cm
  modified_base (18)..(18): 2'-deoxy-2'-fluoroadenosine
  modified_base (19)..(19): gm
  modified_base (20)..(20): 2'-deoxy-2'-fluoroadenosine
  modified_base (21)..(21): gm
  modified_base (22)..(22): 2'-deoxy-2'-fluoroadenosine
  misc_feature (22)..(23): 5'-phosphonothioate
  modified_base (23)..(23): 2'-O-methyladenosine
ugcaauagcaacauggcagagaa

SEQ ID NO: 6167 - RNA, 23 nt, Artificial Sequence
  siRNA antisense strand against b2GPI
  modified_base (1)..(1): 2'-deoxy-2'-fluorocytidine
  modified_base (2)..(2): um
  misc_feature (2)..(3): 5'-phosphonothioate
  modified_base (3)..(3): 2'-deoxy-2'-fluoroguanosine
  modified_base (4)..(4): cm
  modified_base (5)..(5): 2'-deoxy-2'-fluoroadenosine
  modified_base (6)..(6): 2'-O-methyladenosine
  modified_base (7)..(7): 2'-deoxy-2'-fluorouridine
  modified_base (8)..(8): 2'-O-methyladenosine
  modified_base (9)..(9): 2'-deoxy-2'-fluoroguanosine
  modified_base (10)..(10): cm
  modified_base (11)..(11): 2'-O-methyladenosine
  modified_base (12)..(12): 2'-deoxy-2'-fluoroadenosine
  modified_base (13)..(13): cm
  modified_base (14)..(14): 2'-deoxy-2'-fluoroadenosine
  modified_base (15)..(15): um
  modified_base (16)..(16): 2'-deoxy-2'-fluoroguanosine
  modified_base (17)..(17): gm
  modified_base (18)..(18): 2'-deoxy-2'-fluorocytidine
  modified_base (19)..(19): 2'-O-methyladenosine
  modified_base (20)..(20): 2'-deoxy-2'-fluoroguanosine
  modified_base (21)..(21): 2'-O-methyladenosine
  modified_base (22)..(22): 2'-deoxy-2'-fluoroguanosine
  misc_feature (22)..(23): 5'-phosphonothioate
  modified_base (23)..(23): 2'-O-methyladenosine
cugcaauagcaacauggcagaga

SEQ ID NO: 6168 - RNA, 23 nt, Artificial Sequence
  siRNA antisense strand against b2GPI
  modified_base (1)..(1): 2'-deoxy-2'-fluorocytidine
  modified_base (2)..(2): cm
  misc_feature (2)..(3): 5'-phosphonothioate
  modified_base (3)..(3): 2'-deoxy-2'-fluorouridine
  modified_base (4)..(4): gm
  modified_base (5)..(5): 2'-deoxy-2'-fluorocytidine
  modified_base (6)..(6): 2'-O-methyladenosine
  modified_base (7)..(7): 2'-deoxy-2'-fluoroadenosine
  modified_base (8)..(8): um
  modified_base (9)..(9): 2'-deoxy-2'-fluoroadenosine
  modified_base (10)..(10): gm
  modified_base (11)..(11): cm
  modified_base (12)..(12): 2'-deoxy-2'-fluoroadenosine
  modified_base (13)..(13): 2'-O-methyladenosine
  modified_base (14)..(14): 2'-deoxy-2'-fluorocytidine
  modified_base (15)..(15): 2'-O-methyladenosine
  modified_base (16)..(16): 2'-deoxy-2'-fluorouridine
  modified_base (17)..(17): gm
  modified_base (18)..(18): 2'-deoxy-2'-fluoroguanosine
  modified_base (19)..(19): cm
  modified_base (20)..(20): 2'-deoxy-2'-fluoroadenosine
  modified_base (21)..(21): gm
  modified_base (22)..(22): 2'-deoxy-2'-fluoroadenosine
  misc_feature (22)..(23): 5'-phosphonothioate
  modified_base (23)..(23): gm
ccugcaauagcaacauggcagag

SEQ ID NO: 6169 - RNA, 23 nt, Artificial Sequence
  siRNA antisense strand against b2GPI
  modified_base (1)..(1): 2'-deoxy-2'-fluorouridine
  modified_base (2)..(2): cm
  misc_feature (2)..(3): 5'-phosphonothioate
  modified_base (3)..(3): 2'-deoxy-2'-fluorocytidine
  modified_base (4)..(4): um
  modified_base (5)..(5): 2'-deoxy-2'-fluoroguanosine
  modified_base (6)..(6): cm
  modified_base (7)..(7): 2'-deoxy-2'-fluoroadenosine
  modified_base (8)..(8): 2'-O-methyladenosine
  modified_base (9)..(9): 2'-deoxy-2'-fluorouridine
  modified_base (10)..(10): 2'-O-methyladenosine
  modified_base (11)..(11): gm
  modified_base (12)..(12): 2'-deoxy-2'-fluorocytidine
  modified_base (13)..(13): 2'-O-methyladenosine
  modified_base (14)..(14): 2'-deoxy-2'-fluoroadenosine
  modified_base (15)..(15): cm
  modified_base (16)..(16): 2'-deoxy-2'-fluoroadenosine
  modified_base (17)..(17): um
  modified_base (18)..(18): 2'-deoxy-2'-fluoroguanosine
  modified_base (19)..(19): gm
  modified_base (20)..(20): 2'-deoxy-2'-fluorocytidine
  modified_base (21)..(21): 2'-O-methyladenosine
  modified_base (22)..(22): 2'-deoxy-2'-fluoroguanosine
  misc_feature (22)..(23): 5'-phosphonothioate
  modified_base (23)..(23): 2'-O-methyladenosine
uccugcaauagcaacauggcaga

SEQ ID NO: 6170 - RNA, 23 nt, Artificial Sequence
  siRNA antisense strand against b2GPI
  modified_base (1)..(1): 2'-deoxy-2'-fluorouridine
  modified_base (2)..(2): cm
  misc_feature (2)..(3): 5'-phosphonothioate
  modified_base (3)..(3): 2'-deoxy-2'-fluorocytidine
  modified_base (4)..(4): gm
  modified_base (5)..(5): 2'-deoxy-2'-fluorouridine
  modified_base (6)..(6): cm
  modified_base (7)..(7): 2'-deoxy-2'-fluorocytidine
  modified_base (8)..(8): um
  modified_base (9)..(9): 2'-deoxy-2'-fluoroguanosine
  modified_base (10)..(10): cm
  modified_base (11)..(11): 2'-O-methyladenosine
  modified_base (12)..(12): 2'-deoxy-2'-fluoroadenosine
  modified_base (13)..(13): um
  modified_base (14)..(14): 2'-deoxy-2'-fluoroadenosine
  modified_base (15)..(15): gm
  modified_base (16)..(16): 2'-deoxy-2'-fluorocytidine
  modified_base (17)..(17): 2'-O-methyladenosine
  modified_base (18)..(18): 2'-deoxy-2'-fluoroadenosine
  modified_base (19)..(19): cm
  modified_base (20)..(20): 2'-deoxy-2'-fluoroadenosine
  modified_base (21)..(21): um
  modified_base (22)..(22): 2'-deoxy-2'-fluoroguanosine
  misc_feature (22)..(23): 5'-phosphonothioate
  modified_base (23)..(23): gm
uccguccugcaauagcaacaugg

SEQ ID NO: 6171 - RNA, 23 nt, Artificial Sequence
  siRNA antisense strand against b2GPI
  modified_base (1)..(1): 2'-deoxy-2'-fluoroadenosine
  modified_base (2)..(2): gm
  misc_feature (2)..(3): 5'-phosphonothioate
  modified_base (3)..(3): 2'-deoxy-2'-fluoroguanosine
  modified_base (4)..(4): um
  modified_base (5)..(5): 2'-deoxy-2'-fluorocytidine
  modified_base (6)..(6): cm
  modified_base (7)..(7): 2'-deoxy-2'-fluoroguanosine
  modified_base (8)..(8): um
  modified_base (9)..(9): 2'-deoxy-2'-fluorocytidine
  modified_base (10)..(10): cm
  modified_base (11)..(11): um
  modified_base (12)..(12): 2'-deoxy-2'-fluoroguanosine
  modified_base (13)..(13): cm
  modified_base (14)..(14): 2'-deoxy-2'-fluoroadenosine
  modified_base (15)..(15): 2'-O-methyladenosine
  modified_base (16)..(16): 2'-deoxy-2'-fluorouridine
  modified_base (17)..(17): 2'-O-methyladenosine
  modified_base (18)..(18): 2'-deoxy-2'-fluoroguanosine
  modified_base (19)..(19): cm
  modified_base (20)..(20): 2'-deoxy-2'-fluoroadenosine
  modified_base (21)..(21): 2'-O-methyladenosine
  modified_base (22)..(22): 2'-deoxy-2'-fluorocytidine
  misc_feature (22)..(23): 5'-phosphonothioate
  modified_base (23)..(23): 2'-O-methyladenosine
agguccguccugcaauagcaaca

SEQ ID NO: 6172 - RNA, 23 nt, Artificial Sequence
  siRNA antisense strand against b2GPI
  modified_base (1)..(1): 2'-deoxy-2'-fluorocytidine
  modified_base (2)..(2): 2'-O-methyladenosine
  misc_feature (2)..(3): 5'-phosphonothioate
  modified_base (3)..(3): 2'-deoxy-2'-fluoroguanosine
  modified_base (4)..(4): gm
  modified_base (5)..(5): 2'-deoxy-2'-fluorouridine
  modified_base (6)..(6): cm
  modified_base (7)..(7): 2'-deoxy-2'-fluorocytidine
  modified_base (8)..(8): gm
  modified_base (9)..(9): 2'-deoxy-2'-fluorouridine
  modified_base (10)..(10): cm
  modified_base (11)..(11): cm
  modified_base (12)..(12): 2'-deoxy-2'-fluorouridine
  modified_base (13)..(13): gm
  modified_base (14)..(14): 2'-deoxy-2'-fluorocytidine
  modified_base (15)..(15): 2'-O-methyladenosine
  modified_base (16)..(16): 2'-deoxy-2'-fluoroadenosine
  modified_base (17)..(17): um
  modified_base (18)..(18): 2'-deoxy-2'-fluoroadenosine
  modified_base (19)..(19): gm
  modified_base (20)..(20): 2'-deoxy-2'-fluorocytidine
  modified_base (21)..(21): 2'-O-methyladenosine
  modified_base (22)..(22): 2'-deoxy-2'-fluoroadenosine
  misc_feature (22)..(23): 5'-phosphonothioate
  modified_base (23)..(23): cm
cagguccguccugcaauagcaac

SEQ ID NO: 6173 - RNA, 23 nt, Artificial Sequence
  siRNA antisense strand against b2GPI
  modified_base (1)..(1): 2'-deoxy-2'-fluoroadenosine
  modified_base (2)..(2): cm
  misc_feature (2)..(3): 5'-phosphonothioate
  modified_base (3)..(3): 2'-deoxy-2'-fluoroadenosine
  modified_base (4)..(4): gm
  modified_base (5)..(5): 2'-deoxy-2'-fluoroguanosine
  modified_base (6)..(6): um
  modified_base (7)..(7): 2'-deoxy-2'-fluorocytidine
  modified_base (8)..(8): cm
  modified_base (9)..(9): 2'-deoxy-2'-fluoroguanosine
  modified_base (10)..(10): um
  modified_base (11)..(11): cm
  modified_base (12)..(12): 2'-deoxy-2'-fluorocytidine
  modified_base (13)..(13): um
  modified_base (14)..(14): 2'-deoxy-2'-fluoroguanosine
  modified_base (15)..(15): cm
  modified_base (16)..(16): 2'-deoxy-2'-fluoroadenosine
  modified_base (17)..(17): 2'-O-methyladenosine
  modified_base (18)..(18): 2'-deoxy-2'-fluorouridine
  modified_base (19)..(19): 2'-O-methyladenosine
  modified_base (20)..(20): 2'-deoxy-2'-fluoroguanosine
  modified_base (21)..(21): cm
  modified_base (22)..(22): 2'-deoxy-2'-fluoroadenosine
  misc_feature (22)..(23): 5'-phosphonothioate
  modified_base (23)..(23): 2'-O-methyladenosine
acagguccguccugcaauagcaa

SEQ ID NO: 6174 - RNA, 23 nt, Artificial Sequence
  siRNA antisense strand against b2GPI
  modified_base (1)..(1): 2'-deoxy-2'-fluoroguanosine
  modified_base (2)..(2): 2'-O-methyladenosine
  misc_feature (2)..(3): 5'-phosphonothioate
  modified_base (3)..(3): 2'-deoxy-2'-fluorocytidine
  modified_base (4)..(4): 2'-O-methyladenosine
  modified_base (5)..(5): 2'-deoxy-2'-fluoroguanosine
  modified_base (6)..(6): gm
  modified_base (7)..(7): 2'-deoxy-2'-fluorouridine
  modified_base (8)..(8): cm
  modified_base (9)..(9): 2'-deoxy-2'-fluorocytidine
  modified_base (10)..(10): gm
  modified_base (11)..(11): um
  modified_base (12)..(12): 2'-deoxy-2'-fluorocytidine
  modified_base (13)..(13): cm
  modified_base (14)..(14): 2'-deoxy-2'-fluorouridine
  modified_base (15)..(15): gm
  modified_base (16)..(16): 2'-deoxy-2'-fluorocytidine
  modified_base (17)..(17): 2'-O-methyladenosine
  modified_base (18)..(18): 2'-deoxy-2'-fluoroadenosine
  modified_base (19)..(19): um
  modified_base (20)..(20): 2'-deoxy-2'-fluoroadenosine
  modified_base (21)..(21): gm
  modified_base (22)..(22): 2'-deoxy-2'-fluorocytidine
  misc_feature (22)..(23): 5'-phosphonothioate
  modified_base (23)..(23): 2'-O-methyladenosine
gacagguccguccugcaauagca

SEQ ID NO: 6175 - RNA, 23 nt, Artificial Sequence
  siRNA antisense strand against b2GPI
  modified_base (1)..(1): 2'-deoxy-2'-fluorouridine
  modified_base (2)..(2): gm
  misc_feature (2)..(3): 5'-phosphonothioate
  modified_base (3)..(3): 2'-deoxy-2'-fluoroguanosine
  modified_base (4)..(4): gm
  modified_base (5)..(5): 2'-deoxy-2'-fluoroadenosine
  modified_base (6)..(6): cm
  modified_base (7)..(7): 2'-deoxy-2'-fluoroadenosine
  modified_base (8)..(8): gm
  modified_base (9)..(9): 2'-deoxy-2'-fluoroguanosine
  modified_base (10)..(10): um
  modified_base (11)..(11): cm
  modified_base (12)..(12): 2'-deoxy-2'-fluorocytidine
  modified_base (13)..(13): gm
  modified_base (14)..(14): 2'-deoxy-2'-fluorouridine
  modified_base (15)..(15): cm
  modified_base (16)..(16): 2'-deoxy-2'-fluorocytidine
  modified_base (17)..(17): um
  modified_base (18)..(18): 2'-deoxy-2'-fluoroguanosine
  modified_base (19)..(19): cm
  modified_base (20)..(20): 2'-deoxy-2'-fluoroadenosine
  modified_base (21)..(21): 2'-O-methyladenosine
  modified_base (22)..(22): 2'-deoxy-2'-fluorouridine
  misc_feature (22)..(23): 5'-phosphonothioate
  modified_base (23)..(23): 2'-O-methyladenosine
ugggacagguccguccugcaaua

SEQ ID NO: 6176 - RNA, 23 nt, Artificial Sequence
  siRNA antisense strand against b2GPI
  modified_base (1)..(1): 2'-deoxy-2'-fluorocytidine
  modified_base (2)..(2): um
  misc_feature (2)..(3): 5'-phosphonothioate
  modified_base (3)..(3): 2'-deoxy-2'-fluorouridine
  modified_base (4)..(4): gm
  modified_base (5)..(5): 2'-deoxy-2'-fluoroguanosine
  modified_base (6)..(6): gm
  modified_base (7)..(7): 2'-deoxy-2'-fluoroadenosine
  modified_base (8)..(8): cm
  modified_base (9)..(9): 2'-deoxy-2'-fluoroadenosine
  modified_base (10)..(10): gm
  modified_base (11)..(11): gm
  modified_base (12)..(12): 2'-deoxy-2'-fluorouridine
  modified_base (13)..(13): cm
  modified_base (14)..(14): 2'-deoxy-2'-fluorocytidine
  modified_base (15)..(15): gm
  modified_base (16)..(16): 2'-deoxy-2'-fluorouridine
  modified_base (17)..(17): cm
  modified_base (18)..(18): 2'-deoxy-2'-fluorocytidine
  modified_base (19)..(19): um
  modified_base (20)..(20): 2'-deoxy-2'-fluoroguanosine
  modified_base (21)..(21): cm
  modified_base (22)..(22): 2'-deoxy-2'-fluoroadenosine
  misc_feature (22)..(23): 5'-phosphonothioate
  modified_base (23)..(23): 2'-O-methyladenosine
cuugggacagguccguccugcaa

SEQ ID NO: 6177 - RNA, 23 nt, Artificial Sequence
  siRNA antisense strand against b2GPI
  modified_base (1)..(1): 2'-deoxy-2'-fluoroguanosine
  modified_base (2)..(2): cm
  misc_feature (2)..(3): 5'-phosphonothioate
  modified_base (3)..(3): 2'-deoxy-2'-fluorouridine
  modified_base (4)..(4): um
  modified_base (5)..(5): 2'-deoxy-2'-fluoroguanosine
  modified_base (6)..(6): gm
  modified_base (7)..(7): 2'-deoxy-2'-fluoroguanosine
  modified_base (8)..(8): 2'-O-methyladenosine
  modified_base (9)..(9): 2'-deoxy-2'-fluorocytidine
  modified_base (10)..(10): 2'-O-methyladenosine
  modified_base (11)..(11): gm
  modified_base (12)..(12): 2'-deoxy-2'-fluoroguanosine
  modified_base (13)..(13): um
  modified_base (14)..(14): 2'-deoxy-2'-fluorocytidine
  modified_base (15)..(15): cm
  modified_base (16)..(16): 2'-deoxy-2'-fluoroguanosine
  modified_base (17)..(17): um
  modified_base (18)..(18): 2'-deoxy-2'-fluorocytidine
  modified_base (19)..(19): cm
  modified_base (20)..(20): 2'-deoxy-2'-fluorouridine
  modified_base (21)..(21): gm
  modified_base (22)..(22): 2'-deoxy-2'-fluorocytidine
  misc_feature (22)..(23): 5'-phosphonothioate
  modified_base (23)..(23): 2'-O-methyladenosine
gcuugggacagguccguccugca

SEQ ID NO: 6178 - RNA, 23 nt, Artificial Sequence
  siRNA antisense strand against b2GPI
  modified_base (1)..(1): 2'-deoxy-2'-fluorouridine
  modified_base (2)..(2): gm
  misc_feature (2)..(3): 5'-phosphonothioate
  modified_base (3)..(3): 2'-deoxy-2'-fluoroguanosine
  modified_base (4)..(4): cm
  modified_base (5)..(5): 2'-deoxy-2'-fluorouridine
  modified_base (6)..(6): um
  modified_base (7)..(7): 2'-deoxy-2'-fluoroguanosine
  modified_base (8)..(8): gm
  modified_base (9)..(9): 2'-deoxy-2'-fluoroguanosine
  modified_base (10)..(10): 2'-O-methyladenosine
  modified_base (11)..(11): cm
  modified_base (12)..(12): 2'-deoxy-2'-fluoroadenosine
  modified_base (13)..(13): gm
  modified_base (14)..(14): 2'-deoxy-2'-fluoroguanosine
  modified_base (15)..(15): um
  modified_base (16)..(16): 2'-deoxy-2'-fluorocytidine
  modified_base (17)..(17): cm
  modified_base (18)..(18): 2'-deoxy-2'-fluoroguanosine
  modified_base (19)..(19): um
  modified_base (20)..(20): 2'-deoxy-2'-fluorocytidine
  modified_base (21)..(21): cm
  modified_base (22)..(22): 2'-deoxy-2'-fluorouridine
  misc_feature (22)..(23): 5'-phosphonothioate
  modified_base (23)..(23): gm
uggcuugggacagguccguccug

SEQ ID NO: 6179 - RNA, 23 nt, Artificial Sequence
  siRNA antisense strand against b2GPI
  modified_base (1)..(1): 2'-deoxy-2'-fluorocytidine
  modified_base (2)..(2): um
  misc_feature (2)..(3): 5'-phosphonothioate
  modified_base (3)..(3): 2'-deoxy-2'-fluoroguanosine
  modified_base (4)..(4): gm
  modified_base (5)..(5): 2'-deoxy-2'-fluorocytidine
  modified_base (6)..(6): um
  modified_base (7)..(7): 2'-deoxy-2'-fluorouridine
  modified_base (8)..(8): gm
  modified_base (9)..(9): 2'-deoxy-2'-fluoroguanosine
  modified_base (10)..(10): gm
  modified_base (11)..(11): 2'-O-methyladenosine
  modified_base (12)..(12): 2'-deoxy-2'-fluorocytidine
  modified_base (13)..(13): 2'-O-methyladenosine
  modified_base (14)..(14): 2'-deoxy-2'-fluoroguanosine
  modified_base (15)..(15): gm
  modified_base (16)..(16): 2'-deoxy-2'-fluorouridine
  modified_base (17)..(17): cm
  modified_base (18)..(18): 2'-deoxy-2'-fluorocytidine
  modified_base (19)..(19): gm
  modified_base (20)..(20): 2'-deoxy-2'-fluorouridine
  modified_base (21)..(21): cm
  modified_base (22)..(22): 2'-deoxy-2'-fluorocytidine
  misc_feature (22)..(23): 5'-phosphonothioate
  modified_base (23)..(23): um
cuggcuugggacagguccguccu

SEQ ID NO: 6180 - RNA, 23 nt, Artificial Sequence
  siRNA antisense strand against b2GPI
  modified_base (1)..(1): 2'-deoxy-2'-fluorouridine
  modified_base (2)..(2): cm
  misc_feature (2)..(3): 5'-phosphonothioate
  modified_base (3)..(3): 2'-deoxy-2'-fluorouridine
  modified_base (4)..(4): gm
  modified_base (5)..(5): 2'-deoxy-2'-fluoroguanosine
  modified_base (6)..(6): cm
  modified_base (7)..(7): 2'-deoxy-2'-fluorouridine
  modified_base (8)..(8): um
  modified_base (9)..(9): 2'-deoxy-2'-fluoroguanosine
  modified_base (10)..(10): gm
  modified_base (11)..(11): gm
  modified_base (12)..(12): 2'-deoxy-2'-fluoroadenosine
  modified_base (13)..(13): cm
  modified_base (14)..(14): 2'-deoxy-2'-fluoroadenosine
  modified_base (15)..(15): gm
  modified_base (16)..(16): 2'-deoxy-2'-fluoroguanosine
  modified_base (17)..(17): um
  modified_base (18)..(18): 2'-deoxy-2'-fluorocytidine
  modified_base (19)..(19): cm
  modified_base (20)..(20): 2'-deoxy-2'-fluoroguanosine
  modified_base (21)..(21): um
  modified_base (22)..(22): 2'-deoxy-2'-fluorocytidine
  misc_feature (22)..(23): 5'-phosphonothioate
  modified_base (23)..(23): cm
ucuggcuugggacagguccgucc

SEQ ID NO: 6181 - RNA, 23 nt, Artificial Sequence
  siRNA antisense strand against b2GPI
  modified_base (1)..(1): 2'-deoxy-2'-fluoroadenosine
  modified_base (2)..(2): um
  misc_feature (2)..(3): 5'-phosphonothioate
  modified_base (3)..(3): 2'-deoxy-2'-fluorocytidine
  modified_base (4)..(4): um
  modified_base (5)..(5): 2'-deoxy-2'-fluoroguanosine
  modified_base (6)..(6): gm
  modified_base (7)..(7): 2'-deoxy-2'-fluorocytidine
  modified_base (8)..(8): um
  modified_base (9)..(9): 2'-deoxy-2'-fluorouridine
  modified_base (10)..(10): gm
  modified_base (11)..(11): gm
  modified_base (12)..(12): 2'-deoxy-2'-fluoroguanosine
  modified_base (13)..(13): 2'-O-methyladenosine
  modified_base (14)..(14): 2'-deoxy-2'-fluorocytidine
  modified_base (15)..(15): 2'-O-methyladenosine
  modified_base (16)..(16): 2'-deoxy-2'-fluoroguanosine
  modified_base (17)..(17): gm
  modified_base (18)..(18): 2'-deoxy-2'-fluorouridine
  modified_base (19)..(19): cm
  modified_base (20)..(20): 2'-deoxy-2'-fluorocytidine
  modified_base (21)..(21): gm
  modified_base (22)..(22): 2'-deoxy-2'-fluorouridine
  misc_feature (22)..(23): 5'-phosphonothioate
  modified_base (23)..(23): cm
aucuggcuugggacagguccguc

SEQ ID NO: 6182 - RNA, 23 nt, Artificial Sequence
  siRNA antisense strand against b2GPI
  modified_base (1)..(1): 2'-deoxy-2'-fluorocytidine
  modified_base (2)..(2): 2'-O-methyladenosine
  misc_feature (2)..(3): 5'-phosphonothioate
  modified_base (3)..(3): 2'-deoxy-2'-fluorouridine
  modified_base (4)..(4): cm
  modified_base (5)..(5): 2'-deoxy-2'-fluorouridine
  modified_base (6)..(6): gm
  modified_base (7)..(7): 2'-deoxy-2'-fluoroguanosine
  modified_base (8)..(8): cm
  modified_base (9)..(9): 2'-deoxy-2'-fluorouridine
  modified_base (10)..(10): um
  modified_base (11)..(11): gm
  modified_base (12)..(12): 2'-deoxy-2'-fluoroguanosine
  modified_base (13)..(13): gm
  modified_base (14)..(14): 2'-deoxy-2'-fluoroadenosine
  modified_base (15)..(15): cm
  modified_base (16)..(16): 2'-deoxy-2'-fluoroadenosine
  modified_base (17)..(17): gm
  modified_base (18)..(18): 2'-deoxy-2'-fluoroguanosine
  modified_base (19)..(19): um
  modified_base (20)..(20): 2'-deoxy-2'-fluorocytidine
  modified_base (21)..(21): cm
  modified_base (22)..(22): 2'-deoxy-2'-fluoroguanosine
  misc_feature (22)..(23): 5'-phosphonothioate
  modified_base (23)..(23): um
caucuggcuugggacagguccgu

SEQ ID NO: 6183 - RNA, 23 nt, Artificial Sequence
  siRNA antisense strand against b2GPI
  modified_base (1)..(1): 2'-deoxy-2'-fluorouridine
  modified_base (2)..(2): cm
  misc_feature (2)..(3): 5'-phosphonothioate
  modified_base (3)..(3): 2'-deoxy-2'-fluoroadenosine
  modified_base (4)..(4): um
  modified_base (5)..(5): 2'-deoxy-2'-fluorocytidine
  modified_base (6)..(6): um
  modified_base (7)..(7): 2'-deoxy-2'-fluoroguanosine
  modified_base (8)..(8): gm
  modified_base (9)..(9): 2'-deoxy-2'-fluorocytidine
  modified_base (10)..(10): um
  modified_base (11)..(11): um
  modified_base (12)..(12): 2'-deoxy-2'-fluoroguanosine
  modified_base (13)..(13): gm
  modified_base (14)..(14): 2'-deoxy-2'-fluoroguanosine
  modified_base (15)..(15): 2'-O-methyladenosine
  modified_base (16)..(16): 2'-deoxy-2'-fluorocytidine
  modified_base (17)..(17): 2'-O-methyladenosine
  modified_base (18)..(18): 2'-deoxy-2'-fluoroguanosine
  modified_base (19)..(19): gm
  modified_base (20)..(20): 2'-deoxy-2'-fluorouridine
  modified_base (21)..(21): cm
  modified_base (22)..(22): 2'-deoxy-2'-fluorocytidine
  misc_feature (22)..(23): 5'-phosphonothioate
  modified_base (23)..(23): gm
ucaucuggcuugggacagguccg

SEQ ID NO: 6184 - RNA, 23 nt, Artificial Sequence
  siRNA antisense strand against b2GPI
  modified_base (1)..(1): 2'-deoxy-2'-fluoroadenosine
  modified_base (2)..(2): um
  misc_feature (2)..(3): 5'-phosphonothioate
  modified_base (3)..(3): 2'-deoxy-2'-fluorocytidine
  modified_base (4)..(4): 2'-O-methyladenosine
  modified_base (5)..(5): 2'-deoxy-2'-fluorouridine
  modified_base (6)..(6): cm
  modified_base (7)..(7): 2'-deoxy-2'-fluorouridine
  modified_base (8)..(8): gm
  modified_base (9)..(9): 2'-deoxy-2'-fluoroguanosine
  modified_base (10)..(10): cm
  modified_base (11)..(11): um
  modified_base (12)..(12): 2'-deoxy-2'-fluorouridine
  modified_base (13)..(13): gm
  modified_base (14)..(14): 2'-deoxy-2'-fluoroguanosine
  modified_base (15)..(15): gm
  modified_base (16)..(16): 2'-deoxy-2'-fluoroadenosine
  modified_base (17)..(17): cm
  modified_base (18)..(18): 2'-deoxy-2'-fluoroadenosine
  modified_base (19)..(19): gm
  modified_base (20)..(20): 2'-deoxy-2'-fluoroguanosine
  modified_base (21)..(21): um
  modified_base (22)..(22): 2'-deoxy-2'-fluorocytidine
  misc_feature (22)..(23): 5'-phosphonothioate
  modified_base (23)..(23): cm
aucaucuggcuugggacaggucc

SEQ ID NO: 6185 - RNA, 23 nt, Artificial Sequence
  siRNA antisense strand against b2GPI
  modified_base (1)..(1): 2'-deoxy-2'-fluoroadenosine
  modified_base (2)..(2): 2'-O-methyladenosine
  misc_feature (2)..(3): 5'-phosphonothioate
  modified_base (3)..(3): 2'-deoxy-2'-fluorouridine
  modified_base (4)..(4): cm
  modified_base (5)..(5): 2'-deoxy-2'-fluoroadenosine
  modified_base (6)..(6): um
  modified_base (7)..(7): 2'-deoxy-2'-fluorocytidine
  modified_base (8)..(8): um
  modified_base (9)..(9): 2'-deoxy-2'-fluoroguanosine
  modified_base (10)..(10): gm
  modified_base (11)..(11): cm
  modified_base (12)..(12): 2'-deoxy-2'-fluorouridine
  modified_base (13)..(13): um
  modified_base (14)..(14): 2'-deoxy-2'-fluoroguanosine
  modified_base (15)..(15): gm
  modified_base (16)..(16): 2'-deoxy-2'-fluoroguanosine
  modified_base (17)..(17): 2'-O-methyladenosine
  modified_base (18)..(18): 2'-deoxy-2'-fluorocytidine
  modified_base (19)..(19): 2'-O-methyladenosine
  modified_base (20)..(20): 2'-deoxy-2'-fluoroguanosine
  modified_base (21)..(21): gm
  modified_base (22)..(22): 2'-deoxy-2'-fluorouridine
  misc_feature (22)..(23): 5'-phosphonothioate
  modified_base (23)..(23): cm
aaucaucuggcuugggacagguc

SEQ ID NO: 6186 - RNA, 23 nt, Artificial Sequence
  siRNA antisense strand against b2GPI
  modified_base (1)..(1): 2'-deoxy-2'-fluoroadenosine
  modified_base (2)..(2): 2'-O-methyladenosine
  misc_feature (2)..(3): 5'-phosphonothioate
  modified_base (3)..(3): 2'-deoxy-2'-fluoroadenosine
  modified_base (4)..(4): um
  modified_base (5)..(5): 2'-deoxy-2'-fluorocytidine
  modified_base (6)..(6): 2'-O-methyladenosine
  modified_base (7)..(7): 2'-deoxy-2'-fluorouridine
  modified_base (8)..(8): cm
  modified_base (9)..(9): 2'-deoxy-2'-fluorouridine
  modified_base (10)..(10): gm
  modified_base (11)..(11): gm
  modified_base (12)..(12): 2'-deoxy-2'-fluorocytidine
  modified_base (13)..(13): um
  modified_base (14)..(14): 2'-deoxy-2'-fluorouridine
  modified_base (15)..(15): gm
  modified_base (16)..(16): 2'-deoxy-2'-fluoroguanosine
  modified_base (17)..(17): gm
  modified_base (18)..(18): 2'-deoxy-2'-fluoroadenosine
  modified_base (19)..(19): cm
  modified_base (20)..(20): 2'-deoxy-2'-fluoroadenosine
  modified_base (21)..(21): gm
  modified_base (22)..(22): 2'-deoxy-2'-fluoroguanosine
  misc_feature (22)..(23): 5'-phosphonothioate
  modified_base (23)..(23): um
aaaucaucuggcuugggacaggu

SEQ ID NO: 6187 - RNA, 23 nt, Artificial Sequence
  siRNA antisense strand against b2GPI
  modified_base (1)..(1): 2'-deoxy-2'-fluorouridine
  modified_base (2)..(2): 2'-O-methyladenosine
  misc_feature (2)..(3): 5'-phosphonothioate
  modified_base (3)..(3): 2'-deoxy-2'-fluoroadenosine
  modified_base (4)..(4): 2'-O-methyladenosine
  modified_base (5)..(5): 2'-deoxy-2'-fluorouridine
  modified_base (6)..(6): cm
  modified_base (7)..(7): 2'-deoxy-2'-fluoroadenosine
  modified_base (8)..(8): um
  modified_base (9)..(9): 2'-deoxy-2'-fluorocytidine
  modified_base (10)..(10): um
  modified_base (11)..(11): gm
  modified_base (12)..(12): 2'-deoxy-2'-fluoroguanosine
  modified_base (13)..(13): cm
  modified_base (14)..(14): 2'-deoxy-2'-fluorouridine
  modified_base (15)..(15): um
  modified_base (16)..(16): 2'-deoxy-2'-fluoroguanosine
  modified_base (17)..(17): gm
  modified_base (18)..(18): 2'-deoxy-2'-fluoroguanosine
  modified_base (19)..(19): 2'-O-methyladenosine
  modified_base (20)..(20): 2'-deoxy-2'-fluorocytidine
  modified_base (21)..(21): 2'-O-methyladenosine
  modified_base (22)..(22): 2'-deoxy-2'-fluoroguanosine
  misc_feature (22)..(23): 5'-phosphonothioate
  modified_base (23)..(23): gm
uaaaucaucuggcuugggacagg

SEQ ID NO: 6188 - RNA, 23 nt, Artificial Sequence
  siRNA antisense strand against b2GPI
  modified_base (1)..(1): 2'-deoxy-2'-fluoroguanosine
  modified_base (2)..(2): um
  misc_feature (2)..(3): 5'-phosphonothioate
  modified_base (3)..(3): 2'-deoxy-2'-fluoroadenosine
  modified_base (4)..(4): 2'-O-methyladenosine
  modified_base (5)..(5): 2'-deoxy-2'-fluoroadenosine
  modified_base (6)..(6): um
  modified_base (7)..(7): 2'-deoxy-2'-fluorocytidine
  modified_base (8)..(8): 2'-O-methyladenosine
  modified_base (9)..(9): 2'-deoxy-2'-fluorouridine
  modified_base (10)..(10): cm
  modified_base (11)..(11): um
  modified_base (12)..(12): 2'-deoxy-2'-fluoroguanosine
  modified_base (13)..(13): gm
  modified_base (14)..(14): 2'-deoxy-2'-fluorocytidine
  modified_base (15)..(15): um
  modified_base (16)..(16): 2'-deoxy-2'-fluorouridine
  modified_base (17)..(17): gm
  modified_base (18)..(18): 2'-deoxy-2'-fluoroguanosine
  modified_base (19)..(19): gm
  modified_base (20)..(20): 2'-deoxy-2'-fluoroadenosine
  modified_base (21)..(21): cm
  modified_base (22)..(22): 2'-deoxy-2'-fluoroadenosine
  misc_feature (22)..(23): 5'-phosphonothioate
  modified_base (23)..(23): gm
guaaaucaucuggcuugggacag

SEQ ID NO: 6189 - RNA, 23 nt, Artificial Sequence
  siRNA antisense strand against b2GPI
  modified_base (1)..(1): 2'-deoxy-2'-fluoroguanosine
  modified_base (2)..(2): gm
  misc_feature (2)..(3): 5'-phosphonothioate
  modified_base (3)..(3): 2'-deoxy-2'-fluorouridine
  modified_base (4)..(4): 2'-O-methyladenosine
  modified_base (5)..(5): 2'-deoxy-2'-fluoroadenosine
  modified_base (6)..(6): 2'-O-methyladenosine
  modified_base (7)..(7): 2'-deoxy-2'-fluorouridine
  modified_base (8)..(8): cm
  modified_base (9)..(9): 2'-deoxy-2'-fluoroadenosine
  modified_base (10)..(10): um
  modified_base (11)..(11): cm
  modified_base (12)..(12): 2'-deoxy-2'-fluorouridine
  modified_base (13)..(13): gm
  modified_base (14)..(14): 2'-deoxy-2'-fluoroguanosine
  modified_base (15)..(15): cm
  modified_base (16)..(16): 2'-deoxy-2'-fluorouridine
  modified_base (17)..(17): um
  modified_base (18)..(18): 2'-deoxy-2'-fluoroguanosine
  modified_base (19)..(19): gm
  modified_base (20)..(20): 2'-deoxy-2'-fluoroguanosine
  modified_base (21)..(21): 2'-O-methyladenosine
  modified_base (22)..(22): 2'-deoxy-2'-fluorocytidine
  misc_feature (22)..(23): 5'-phosphonothioate
  modified_base (23)..(23): 2'-O-methyladenosine
gguaaaucaucuggcuugggaca

SEQ ID NO: 6190 - RNA, 23 nt, Artificial Sequence
  siRNA antisense strand against b2GPI
  modified_base (1)..(1): 2'-deoxy-2'-fluorouridine
  modified_base (2)..(2): gm
  misc_feature (2)..(3): 5'-phosphonothioate
  modified_base (3)..(3): 2'-deoxy-2'-fluoroguanosine
  modified_base (4)..(4): um
  modified_base (5)..(5): 2'-deoxy-2'-fluoroadenosine
  modified_base (6)..(6): 2'-O-methyladenosine
  modified_base (7)..(7): 2'-deoxy-2'-fluoroadenosine
  modified_base (8)..(8): um
  modified_base (9)..(9): 2'-deoxy-2'-fluorocytidine
  modified_base (10)..(10): 2'-O-methyladenosine
  modified_base (11)..(11): um
  modified_base (12)..(12): 2'-deoxy-2'-fluorocytidine
  modified_base (13)..(13): um
  modified_base (14)..(14): 2'-deoxy-2'-fluoroguanosine
  modified_base (15)..(15): gm
  modified_base (16)..(16): 2'-deoxy-2'-fluorocytidine
  modified_base (17)..(17): um
  modified_base (18)..(18): 2'-deoxy-2'-fluorouridine
  modified_base (19)..(19): gm
  modified_base (20)..(20): 2'-deoxy-2'-fluoroguanosine
  modified_base (21)..(21): gm
  modified_base (22)..(22): 2'-deoxy-2'-fluoroadenosine
  misc_feature (22)..(23): 5'-phosphonothioate
  modified_base (23)..(23): cm
ugguaaaucaucuggcuugggac

SEQ ID NO: 6191 - RNA, 23 nt, Artificial Sequence
  siRNA antisense strand against b2GPI
  modified_base (1)..(1): 2'-deoxy-2'-fluoroadenosine
  modified_base (2)..(2): um
  misc_feature (2)..(3): 5'-phosphonothioate
  modified_base (3)..(3): 2'-deoxy-2'-fluoroguanosine
  modified_base (4)..(4): gm
  modified_base (5)..(5): 2'-deoxy-2'-fluorouridine
  modified_base (6)..(6): 2'-O-methyladenosine
  modified_base (7)..(7): 2'-deoxy-2'-fluoroadenosine
  modified_base (8)..(8): 2'-O-methyladenosine
  modified_base (9)..(9): 2'-deoxy-2'-fluorouridine
  modified_base (10)..(10): cm
  modified_base (11)..(11): 2'-O-methyladenosine
  modified_base (12)..(12): 2'-deoxy-2'-fluorouridine
  modified_base (13)..(13): cm
  modified_base (14)..(14): 2'-deoxy-2'-fluorouridine
  modified_base (15)..(15): gm
  modified_base (16)..(16): 2'-deoxy-2'-fluoroguanosine
  modified_base (17)..(17): cm
  modified_base (18)..(18): 2'-deoxy-2'-fluorouridine
  modified_base (19)..(19): um
  modified_base (20)..(20): 2'-deoxy-2'-fluoroguanosine
  modified_base (21)..(21): gm
  modified_base (22)..(22): 2'-deoxy-2'-fluoroguanosine
  misc_feature (22)..(23): 5'-phosphonothioate
  modified_base (23)..(23): 2'-O-methyladenosine
augguaaaucaucuggcuuggga

SEQ ID NO: 6192 - RNA, 23 nt, Artificial Sequence
  siRNA antisense strand against b2GPI
  modified_base (1)..(1): 2'-deoxy-2'-fluoroadenosine
  modified_base (2)..(2): 2'-O-methyladenosine
  misc_feature (2)..(3): 5'-phosphonothioate
  modified_base (3)..(3): 2'-deoxy-2'-fluorouridine
  modified_base (4)..(4): gm
  modified_base (5)..(5): 2'-deoxy-2'-fluoroguanosine
  modified_base (6)..(6): um
  modified_base (7)..(7): 2'-deoxy-2'-fluoroadenosine
  modified_base (8)..(8): 2'-O-methyladenosine
  modified_base (9)..(9): 2'-deoxy-2'-fluoroadenosine
  modified_base (10)..(10): um
  modified_base (11)..(11): cm
  modified_base (12)..(12): 2'-deoxy-2'-fluoroadenosine
  modified_base (13)..(13): um
  modified_base (14)..(14): 2'-deoxy-2'-fluorocytidine
  modified_base (15)..(15): um
  modified_base (16)..(16): 2'-deoxy-2'-fluoroguanosine
  modified_base (17)..(17): gm
  modified_base (18)..(18): 2'-deoxy-2'-fluorocytidine
  modified_base (19)..(19): um
  modified_base (20)..(20): 2'-deoxy-2'-fluorouridine
  modified_base (21)..(21): gm
  modified_base (22)..(22): 2'-deoxy-2'-fluoroguanosine
  misc_feature (22)..(23): 5'-phosphonothioate
  modified_base (23)..(23): gm
aaugguaaaucaucuggcuuggg

SEQ ID NO: 6193 - RNA, 23 nt, Artificial Sequence
  siRNA antisense strand against b2GPI
  modified_base (1)..(1): 2'-deoxy-2'-fluoroadenosine
  modified_base (2)..(2): 2'-O-methyladenosine
  misc_feature (2)..(3): 5'-phosphonothioate
  modified_base (3)..(3): 2'-deoxy-2'-fluoroadenosine
  modified_base (4)..(4): um
  modified_base (5)..(5): 2'-deoxy-2'-fluoroguanosine
  modified_base (6)..(6): gm
  modified_base (7)..(7): 2'-deoxy-2'-fluorouridine
  modified_base (8)..(8): 2'-O-methyladenosine
  modified_base (9)..(9): 2'-deoxy-2'-fluoroadenosine
  modified_base (10)..(10): 2'-O-methyladenosine
  modified_base (11)..(11): um
  modified_base (12)..(12): 2'-deoxy-2'-fluorocytidine
  modified_base (13)..(13): 2'-O-methyladenosine
  modified_base (14)..(14): 2'-deoxy-2'-fluorouridine
  modified_base (15)..(15): cm
  modified_base (16)..(16): 2'-deoxy-2'-fluorouridine
  modified_base (17)..(17): gm
  modified_base (18)..(18): 2'-deoxy-2'-fluoroguanosine
  modified_base (19)..(19): cm
  modified_base (20)..(20): 2'-deoxy-2'-fluorouridine
  modified_base (21)..(21): um
  modified_base (22)..(22): 2'-deoxy-2'-fluoroguanosine
  misc_feature (22)..(23): 5'-phosphonothioate
  modified_base (23)..(23): gm
aaaugguaaaucaucuggcuugg

SEQ ID NO: 6194 - RNA, 23 nt, Artificial Sequence
  siRNA antisense strand against b2GPI
  modified_base (1)..(1): 2'-deoxy-2'-fluoroadenosine
  modified_base (2)..(2): 2'-O-methyladenosine
  misc_feature (2)..(3): 5'-phosphonothioate
  modified_base (3)..(3): 2'-deoxy-2'-fluoroadenosine
  modified_base (4)..(4): 2'-O-methyladenosine
  modified_base (5)..(5): 2'-deoxy-2'-fluorouridine
  modified_base (6)..(6): gm
  modified_base (7)..(7): 2'-deoxy-2'-fluoroguanosine
  modified_base (8)..(8): um
  modified_base (9)..(9): 2'-deoxy-2'-fluoroadenosine
  modified_base (10)..(10): 2'-O-methyladenosine
  modified_base (11)..(11): 2'-O-methyladenosine
  modified_base (12)..(12): 2'-deoxy-2'-fluorouridine
  modified_base (13)..(13): cm
  modified_base (14)..(14): 2'-deoxy-2'-fluoroadenosine
  modified_base (15)..(15): um
  modified_base (16)..(16): 2'-deoxy-2'-fluorocytidine
  modified_base (17)..(17): um
  modified_base (18)..(18): 2'-deoxy-2'-fluoroguanosine
  modified_base (19)..(19): gm
  modified_base (20)..(20): 2'-deoxy-2'-fluorocytidine
  modified_base (21)..(21): um
  modified_base (22)..(22): 2'-deoxy-2'-fluorouridine
  misc_feature (22)..(23): 5'-phosphonothioate
  modified_base (23)..(23): gm
aaaaugguaaaucaucuggcuug

SEQ ID NO: 6195 - RNA, 23 nt, Artificial Sequence
  siRNA antisense strand against b2GPI
  modified_base (1)..(1): 2'-deoxy-2'-fluoroguanosine
  modified_base (2)..(2): 2'-O-methyladenosine
  misc_feature (2)..(3): 5'-phosphonothioate
  modified_base (3)..(3): 2'-deoxy-2'-fluoroadenosine
  modified_base (4)..(4): 2'-O-methyladenosine
  modified_base (5)..(5): 2'-deoxy-2'-fluoroadenosine
  modified_base (6)..(6): um
  modified_base (7)..(7): 2'-deoxy-2'-fluoroguanosine
  modified_base (8)..(8): gm
  modified_base (9)..(9): 2'-deoxy-2'-fluorouridine
  modified_base (10)..(10): 2'-O-methyladenosine
  modified_base (11)..(11): 2'-O-methyladenosine
  modified_base (12)..(12): 2'-deoxy-2'-fluoroadenosine
  modified_base (13)..(13): um
  modified_base (14)..(14): 2'-deoxy-2'-fluorocytidine
  modified_base (15)..(15): 2'-O-methyladenosine
  modified_base (16)..(16): 2'-deoxy-2'-fluorouridine
  modified_base (17)..(17): cm
  modified_base (18)..(18): 2'-deoxy-2'-fluorouridine
  modified_base (19)..(19): gm
  modified_base (20)..(20): 2'-deoxy-2'-fluoroguanosine
  modified_base (21)..(21): cm
  modified_base (22)..(22): 2'-deoxy-2'-fluorouridine
  misc_feature (22)..(23): 5'-phosphonothioate
  modified_base (23)..(23): um
gaaaaugguaaaucaucuggcuu

SEQ ID NO: 6196 - RNA, 23 nt, Artificial Sequence
  siRNA antisense strand against b2GPI
  modified_base (1)..(1): 2'-deoxy-2'-fluoroguanosine
  modified_base (2)..(2): gm
  misc_feature (2)..(3): 5'-phosphonothioate
  modified_base (3)..(3): 2'-deoxy-2'-fluoroadenosine
  modified_base (4)..(4): 2'-O-methyladenosine
  modified_base (5)..(5): 2'-deoxy-2'-fluoroadenosine
  modified_base (6)..(6): 2'-O-methyladenosine
  modified_base (7)..(7): 2'-deoxy-2'-fluorouridine
  modified_base (8)..(8): gm
  modified_base (9)..(9): 2'-deoxy-2'-fluoroguanosine
  modified_base (10)..(10): um
  modified_base (11)..(11): 2'-O-methyladenosine
  modified_base (12)..(12): 2'-deoxy-2'-fluoroadenosine
  modified_base (13)..(13): 2'-O-methyladenosine
  modified_base (14)..(14): 2'-deoxy-2'-fluorouridine
  modified_base (15)..(15): cm
  modified_base (16)..(16): 2'-deoxy-2'-fluoroadenosine
  modified_base (17)..(17): um
  modified_base (18)..(18): 2'-deoxy-2'-fluorocytidine
  modified_base (19)..(19): um
  modified_base (20)..(20): 2'-deoxy-2'-fluoroguanosine
  modified_base (21)..(21): gm
  modified_base (22)..(22): 2'-deoxy-2'-fluorocytidine
  misc_feature (22)..(23): 5'-phosphonothioate
  modified_base (23)..(23): um
ggaaaaugguaaaucaucuggcu

SEQ ID NO: 6197 - RNA, 23 nt, Artificial Sequence
  siRNA antisense strand against b2GPI
  modified_base (1)..(1): 2'-deoxy-2'-fluorouridine
  modified_base (2)..(2): gm
  misc_feature (2)..(3): 5'-phosphonothioate
  modified_base (3)..(3): 2'-deoxy-2'-fluoroguanosine
  modified_base (4)..(4): 2'-O-methyladenosine
  modified_base (5)..(5): 2'-deoxy-2'-fluoroadenosine
  modified_base (6)..(6): 2'-O-methyladenosine
  modified_base (7)..(7): 2'-deoxy-2'-fluoroadenosine
  modified_base (8)..(8): um
  modified_base (9)..(9): 2'-deoxy-2'-fluoroguanosine
  modified_base (10)..(10): gm
  modified_base (11)..(11): um
  modified_base (12)..(12): 2'-deoxy-2'-fluoroadenosine
  modified_base (13)..(13): 2'-O-methyladenosine
  modified_base (14)..(14): 2'-deoxy-2'-fluoroadenosine
  modified_base (15)..(15): um
  modified_base (16)..(16): 2'-deoxy-2'-fluorocytidine
  modified_base (17)..(17): 2'-O-methyladenosine
  modified_base (18)..(18): 2'-deoxy-2'-fluorouridine
  modified_base (19)..(19): cm
  modified_base (20)..(20): 2'-deoxy-2'-fluorouridine
  modified_base (21)..(21): gm
  modified_base (22)..(22): 2'-deoxy-2'-fluoroguanosine
  misc_feature (22)..(23): 5'-phosphonothioate
  modified_base (23)..(23): cm
uggaaaaugguaaaucaucuggc

SEQ ID NO: 6198 - RNA, 23 nt, Artificial Sequence
  siRNA antisense strand against b2GPI
  modified_base (1)..(1): 2'-deoxy-2'-fluoroguanosine
  modified_base (2)..(2): um
  misc_feature (2)..(3): 5'-phosphonothioate
  modified_base (3)..(3): 2'-deoxy-2'-fluoroguanosine
  modified_base (4)..(4): gm
  modified_base (5)..(5): 2'-deoxy-2'-fluoroadenosine
  modified_base (6)..(6): 2'-O-methyladenosine
  modified_base (7)..(7): 2'-deoxy-2'-fluoroadenosine
  modified_base (8)..(8): 2'-O-methyladenosine
  modified_base (9)..(9): 2'-deoxy-2'-fluorouridine
  modified_base (10)..(10): gm
  modified_base (11)..(11): gm
  modified_base (12)..(12): 2'-deoxy-2'-fluorouridine
  modified_base (13)..(13): 2'-O-methyladenosine
  modified_base (14)..(14): 2'-deoxy-2'-fluoroadenosine
  modified_base (15)..(15): 2'-O-methyladenosine
  modified_base (16)..(16): 2'-deoxy-2'-fluorouridine
  modified_base (17)..(17): cm
  modified_base (18)..(18): 2'-deoxy-2'-fluoroadenosine
  modified_base (19)..(19): um
  modified_base (20)..(20): 2'-deoxy-2'-fluorocytidine
  modified_base (21)..(21): um
  modified_base (22)..(22): 2'-deoxy-2'-fluoroguanosine
  misc_feature (22)..(23): 5'-phosphonothioate
  modified_base (23)..(23): gm
guggaaaaugguaaaucaucugg

SEQ ID NO: 6199 - RNA, 23 nt, Artificial Sequence
  siRNA antisense strand against b2GPI
  modified_base (1)..(1): 2'-deoxy-2'-fluorouridine
  modified_base (2)..(2): gm
  misc_feature (2)..(3): 5'-phosphonothioate
  modified_base (3)..(3): 2'-deoxy-2'-fluorouridine
  modified_base (4)..(4): gm
  modified_base (5)..(5): 2'-deoxy-2'-fluoroguanosine
  modified_base (6)..(6): 2'-O-methyladenosine
  modified_base (7)..(7): 2'-deoxy-2'-fluoroadenosine
  modified_base (8)..(8): 2'-O-methyladenosine
  modified_base (9)..(9): 2'-deoxy-2'-fluoroadenosine
  modified_base (10)..(10): um
  modified_base (11)..(11): gm
  modified_base (12)..(12): 2'-deoxy-2'-fluoroguanosine
  modified_base (13)..(13): um
  modified_base (14)..(14): 2'-deoxy-2'-fluoroadenosine
  modified_base (15)..(15): 2'-O-methyladenosine
  modified_base (16)..(16): 2'-deoxy-2'-fluoroadenosine
  modified_base (17)..(17): um
  modified_base (18)..(18): 2'-deoxy-2'-fluorocytidine
  modified_base (19)..(19): 2'-O-methyladenosine
  modified_base (20)..(20): 2'-deoxy-2'-fluorouridine
  modified_base (21)..(21): cm
  modified_base (22)..(22): 2'-deoxy-2'-fluorouridine
  misc_feature (22)..(23): 5'-phosphonothioate
  modified_base (23)..(23): gm
uguggaaaaugguaaaucaucug

SEQ ID NO: 6200 - RNA, 23 nt, Artificial Sequence
  siRNA antisense strand against b2GPI
  modified_base (1)..(1): 2'-deoxy-2'-fluorocytidine
  modified_base (2)..(2): um
  misc_feature (2)..(3): 5'-phosphonothioate
  modified_base (3)..(3): 2'-deoxy-2'-fluoroguanosine
  modified_base (4)..(4): um
  modified_base (5)..(5): 2'-deoxy-2'-fluoroguanosine
  modified_base (6)..(6): gm
  modified_base (7)..(7): 2'-deoxy-2'-fluoroadenosine
  modified_base (8)..(8): 2'-O-methyladenosine
  modified_base (9)..(9): 2'-deoxy-2'-fluoroadenosine
  modified_base (10)..(10): 2'-O-methyladenosine
  modified_base (11)..(11): um
  modified_base (12)..(12): 2'-deoxy-2'-fluoroguanosine
  modified_base (13)..(13): gm
  modified_base (14)..(14): 2'-deoxy-2'-fluorouridine
  modified_base (15)..(15): 2'-O-methyladenosine
  modified_base (16)..(16): 2'-deoxy-2'-fluoroadenosine
  modified_base (17)..(17): 2'-O-methyladenosine
  modified_base (18)..(18): 2'-deoxy-2'-fluorouridine
  modified_base (19)..(19): cm
  modified_base (20)..(20): 2'-deoxy-2'-fluoroadenosine
  modified_base (21)..(21): um
  modified_base (22)..(22): 2'-deoxy-2'-fluorocytidine
  misc_feature (22)..(23): 5'-phosphonothioate
  modified_base (23)..(23): um
cuguggaaaaugguaaaucaucu

SEQ ID NO: 6201 - RNA, 23 nt, Artificial Sequence
  siRNA antisense strand against b2GPI
  modified_base (1)..(1): 2'-deoxy-2'-fluoroadenosine
  modified_base (2)..(2): cm
  misc_feature (2)..(3): 5'-phosphonothioate
  modified_base (3)..(3): 2'-deoxy-2'-fluorocytidine
  modified_base (4)..(4): 2'-O-methyladenosine
  modified_base (5)..(5): 2'-deoxy-2'-fluorocytidine
  modified_base (6)..(6): um
  modified_base (7)..(7): 2'-deoxy-2'-fluoroguanosine
  modified_base (8)..(8): um
  modified_base (9)..(9): 2'-deoxy-2'-fluoroguanosine
  modified_base (10)..(10): gm
  modified_base (11)..(11): 2'-O-methyladenosine
  modified_base (12)..(12): 2'-deoxy-2'-fluoroadenosine
  modified_base (13)..(13): 2'-O-methyladenosine
  modified_base (14)..(14): 2'-deoxy-2'-fluoroadenosine
  modified_base (15)..(15): um
  modified_base (16)..(16): 2'-deoxy-2'-fluoroguanosine
  modified_base (17)..(17): gm
  modified_base (18)..(18): 2'-deoxy-2'-fluorouridine
  modified_base (19)..(19): 2'-O-methyladenosine
  modified_base (20)..(20): 2'-deoxy-2'-fluoroadenosine
  modified_base (21)..(21): 2'-O-methyladenosine
  modified_base (22)..(22): 2'-deoxy-2'-fluorouridine
  misc_feature (22)..(23): 5'-phosphonothioate
  modified_base (23)..(23): cm
accacuguggaaaaugguaaauc

SEQ ID NO: 6202 - RNA, 23 nt, Artificial Sequence
  siRNA antisense strand against b2GPI
  modified_base (1)..(1): 2'-deoxy-2'-fluoroguanosine
  modified_base (2)..(2): 2'-O-methyladenosine
  misc_feature (2)..(3): 5'-phosphonothioate
  modified_base (3)..(3): 2'-deoxy-2'-fluorocytidine
  modified_base (4)..(4): cm
  modified_base (5)..(5): 2'-deoxy-2'-fluoroadenosine
  modified_base (6)..(6): cm
  modified_base (7)..(7): 2'-deoxy-2'-fluorouridine
  modified_base (8)..(8): gm
  modified_base (9)..(9): 2'-deoxy-2'-fluorouridine
  modified_base (10)..(10): gm
  modified_base (11)..(11): gm
  modified_base (12)..(12): 2'-deoxy-2'-fluoroadenosine
  modified_base (13)..(13): 2'-O-methyladenosine
  modified_base (14)..(14): 2'-deoxy-2'-fluoroadenosine
  modified_base (15)..(15): 2'-O-methyladenosine
  modified_base (16)..(16): 2'-deoxy-2'-fluorouridine
  modified_base (17)..(17): gm
  modified_base (18)..(18): 2'-deoxy-2'-fluoroguanosine
  modified_base (19)..(19): um
  modified_base (20)..(20): 2'-deoxy-2'-fluoroadenosine
  modified_base (21)..(21): 2'-O-methyladenosine
  modified_base (22)..(22): 2'-deoxy-2'-fluoroadenosine
  misc_feature (22)..(23): 5'-phosphonothioate
  modified_base (23)..(23): um
gaccacuguggaaaaugguaaau

SEQ ID NO: 6203 - RNA, 23 nt, Artificial Sequence
  siRNA antisense strand against b2GPI
  modified_base (1)..(1): 2'-deoxy-2'-fluoroguanosine
  modified_base (2)..(2): gm
  misc_feature (2)..(3): 5'-phosphonothioate
  modified_base (3)..(3): 2'-deoxy-2'-fluoroadenosine
  modified_base (4)..(4): cm
  modified_base (5)..(5): 2'-deoxy-2'-fluorocytidine
  modified_base (6)..(6): 2'-O-methyladenosine
  modified_base (7)..(7): 2'-deoxy-2'-fluorocytidine
  modified_base (8)..(8): um
  modified_base (9)..(9): 2'-deoxy-2'-fluoroguanosine
  modified_base (10)..(10): um
  modified_base (11)..(11): gm
  modified_base (12)..(12): 2'-deoxy-2'-fluoroguanosine
  modified_base (13)..(13): 2'-O-methyladenosine
  modified_base (14)..(14): 2'-deoxy-2'-fluoroadenosine
  modified_base (15)..(15): 2'-O-methyladenosine
  modified_base (16)..(16): 2'-deoxy-2'-fluoroadenosine
  modified_base (17)..(17): um
  modified_base (18)..(18): 2'-deoxy-2'-fluoroguanosine
  modified_base (19)..(19): gm
  modified_base (20)..(20): 2'-deoxy-2'-fluorouridine
  modified_base (21)..(21): 2'-O-methyladenosine
  modified_base (22)..(22): 2'-deoxy-2'-fluoroadenosine
  misc_feature (22)..(23): 5'-phosphonothioate
  modified_base (23)..(23): 2'-O-methyladenosine
ggaccacuguggaaaaugguaaa

SEQ ID NO: 6204 - RNA, 23 nt, Artificial Sequence
  siRNA antisense strand against b2GPI
  modified_base (1)..(1): 2'-deoxy-2'-fluoroadenosine
  modified_base (2)..(2): 2'-O-methyladenosine
  misc_feature (2)..(3): 5'-phosphonothioate
  modified_base (3)..(3): 2'-deoxy-2'-fluorocytidine
  modified_base (4)..(4): gm
  modified_base (5)..(5): 2'-deoxy-2'-fluoroguanosine
  modified_base (6)..(6): gm
  modified_base (7)..(7): 2'-deoxy-2'-fluoroadenosine
  modified_base (8)..(8): cm
  modified_base (9)..(9): 2'-deoxy-2'-fluorocytidine
  modified_base (10)..(10): 2'-O-methyladenosine
  modified_base (11)..(11): cm
  modified_base (12)..(12): 2'-deoxy-2'-fluorouridine
  modified_base (13)..(13): gm
  modified_base (14)..(14): 2'-deoxy-2'-fluorouridine
  modified_base (15)..(15): gm
  modified_base (16)..(16): 2'-deoxy-2'-fluoroguanosine
  modified_base (17)..(17): 2'-O-methyladenosine
  modified_base (18)..(18): 2'-deoxy-2'-fluoroadenosine
  modified_base (19)..(19): 2'-O-methyladenosine
  modified_base (20)..(20): 2'-deoxy-2'-fluoroadenosine
  modified_base (21)..(21): um
  modified_base (22)..(22): 2'-deoxy-2'-fluoroguanosine
  misc_feature (22)..(23): 5'-phosphonothioate
  modified_base (23)..(23): gm
aacgggaccacuguggaaaaugg

SEQ ID NO: 6205 - RNA, 23 nt, Artificial Sequence
  siRNA antisense strand against b2GPI
  modified_base (1)..(1): 2'-deoxy-2'-fluorouridine
  modified_base (2)..(2): 2'-O-methyladenosine
  misc_feature (2)..(3): 5'-phosphonothioate
  modified_base (3)..(3): 2'-deoxy-2'-fluoroadenosine
  modified_base (4)..(4): cm
  modified_base (5)..(5): 2'-deoxy-2'-fluoroguanosine
  modified_base (6)..(6): gm
  modified_base (7)..(7): 2'-deoxy-2'-fluoroguanosine
  modified_base (8)..(8): 2'-O-methyladenosine
  modified_base (9)..(9): 2'-deoxy-2'-fluorocytidine
  modified_base (10)..(10): cm
  modified_base (11)..(11): 2'-O-methyladenosine
  modified_base (12)..(12): 2'-deoxy-2'-fluorocytidine
  modified_base (13)..(13): um
  modified_base (14)..(14): 2'-deoxy-2'-fluoroguanosine
  modified_base (15)..(15): um
  modified_base (16)..(16): 2'-deoxy-2'-fluoroguanosine
  modified_base (17)..(17): gm
  modified_base (18)..(18): 2'-deoxy-2'-fluoroadenosine
  modified_base (19)..(19): 2'-O-methyladenosine
  modified_base (20)..(20): 2'-deoxy-2'-fluoroadenosine
  modified_base (21)..(21): 2'-O-methyladenosine
  modified_base (22)..(22): 2'-deoxy-2'-fluorouridine
  misc_feature (22)..(23): 5'-phosphonothioate
  modified_base (23)..(23): gm
uaacgggaccacuguggaaaaug

SEQ ID NO: 6206 - RNA, 23 nt, Artificial Sequence
  siRNA antisense strand against b2GPI
  modified_base (1)..(1): 2'-deoxy-2'-fluorouridine
  modified_base (2)..(2): um
  misc_feature (2)..(3): 5'-phosphonothioate
  modified_base (3)..(3): 2'-deoxy-2'-fluoroadenosine
  modified_base (4)..(4): 2'-O-methyladenosine
  modified_base (5)..(5): 2'-deoxy-2'-fluorocytidine
  modified_base (6)..(6): gm
  modified_base (7)..(7): 2'-deoxy-2'-fluoroguanosine
  modified_base (8)..(8): gm
  modified_base (9)..(9): 2'-deoxy-2'-fluoroadenosine
  modified_base (10)..(10): cm
  modified_base (11)..(11): cm
  modified_base (12)..(12): 2'-deoxy-2'-fluoroadenosine
  modified_base (13)..(13): cm
  modified_base (14)..(14): 2'-deoxy-2'-fluorouridine
  modified_base (15)..(15): gm
  modified_base (16)..(16): 2'-deoxy-2'-fluorouridine
  modified_base (17)..(17): gm
  modified_base (18)..(18): 2'-deoxy-2'-fluoroguanosine
  modified_base (19)..(19): 2'-O-methyladenosine
  modified_base (20)..(20): 2'-deoxy-2'-fluoroadenosine
  modified_base (21)..(21): 2'-O-methyladenosine
  modified_base (22)..(22): 2'-deoxy-2'-fluoroadenosine
  misc_feature (22)..(23): 5'-phosphonothioate
  modified_base (23)..(23): um
uuaacgggaccacuguggaaaau

SEQ ID NO: 6207 - RNA, 23 nt, Artificial Sequence
  siRNA antisense strand against b2GPI
  modified_base (1)..(1): 2'-deoxy-2'-fluorouridine
  modified_base (2)..(2): um
  misc_feature (2)..(3): 5'-phosphonothioate
  modified_base (3)..(3): 2'-deoxy-2'-fluorouridine
  modified_base (4)..(4): 2'-O-methyladenosine
  modified_base (5)..(5): 2'-deoxy-2'-fluoroadenosine
  modified_base (6)..(6): cm
  modified_base (7)..(7): 2'-deoxy-2'-fluoroguanosine
  modified_base (8)..(8): gm
  modified_base (9)..(9): 2'-deoxy-2'-fluoroguanosine
  modified_base (10)..(10): 2'-O-methyladenosine
  modified_base (11)..(11): cm
  modified_base (12)..(12): 2'-deoxy-2'-fluorocytidine
  modified_base (13)..(13): 2'-O-methyladenosine
  modified_base (14)..(14): 2'-deoxy-2'-fluorocytidine
  modified_base (15)..(15): um
  modified_base (16)..(16): 2'-deoxy-2'-fluoroguanosine
  modified_base (17)..(17): um
  modified_base (18)..(18): 2'-deoxy-2'-fluoroguanosine
  modified_base (19)..(19): gm
  modified_base (20)..(20): 2'-deoxy-2'-fluoroadenosine
  modified_base (21)..(21): 2'-O-methyladenosine
  modified_base (22)..(22): 2'-deoxy-2'-fluoroadenosine
  misc_feature (22)..(23): 5'-phosphonothioate
  modified_base (23)..(23): 2'-O-methyladenosine
uuuaacgggaccacuguggaaaa

SEQ ID NO: 6208 - RNA, 23 nt, Artificial Sequence
  siRNA antisense strand against b2GPI
  modified_base (1)..(1): 2'-deoxy-2'-fluorouridine
  modified_base (2)..(2): um
  misc_feature (2)..(3): 5'-phosphonothioate
  modified_base (3)..(3): 2'-deoxy-2'-fluorouridine
  modified_base (4)..(4): um
  modified_base (5)..(5): 2'-deoxy-2'-fluoroadenosine
  modified_base (6)..(6): 2'-O-methyladenosine
  modified_base (7)..(7): 2'-deoxy-2'-fluorocytidine
  modified_base (8)..(8): gm
  modified_base (9)..(9): 2'-deoxy-2'-fluoroguanosine
  modified_base (10)..(10): gm
  modified_base (11)..(11): 2'-O-methyladenosine
  modified_base (12)..(12): 2'-deoxy-2'-fluorocytidine
  modified_base (13)..(13): cm
  modified_base (14)..(14): 2'-deoxy-2'-fluoroadenosine
  modified_base (15)..(15): cm
  modified_base (16)..(16): 2'-deoxy-2'-fluorouridine
  modified_base (17)..(17): gm
  modified_base (18)..(18): 2'-deoxy-2'-fluorouridine
  modified_base (19)..(19): gm
  modified_base (20)..(20): 2'-deoxy-2'-fluoroguanosine
  modified_base (21)..(21): 2'-O-methyladenosine
  modified_base (22)..(22): 2'-deoxy-2'-fluoroadenosine
  misc_feature (22)..(23): 5'-phosphonothioate
  modified_base (23)..(23): 2'-O-methyladenosine
uuuuaacgggaccacuguggaaa

SEQ ID NO: 6209 - RNA, 23 nt, Artificial Sequence
  siRNA antisense strand against b2GPI
  modified_base (1)..(1): 2'-deoxy-2'-fluorouridine
  modified_base (2)..(2): um
  misc_feature (2)..(3): 5'-phosphonothioate
  modified_base (3)..(3): 2'-deoxy-2'-fluorouridine
  modified_base (4)..(4): um
  modified_base (5)..(5): 2'-deoxy-2'-fluorouridine
  modified_base (6)..(6): 2'-O-methyladenosine
  modified_base (7)..(7): 2'-deoxy-2'-fluoroadenosine
  modified_base (8)..(8): cm
  modified_base (9)..(9): 2'-deoxy-2'-fluoroguanosine
  modified_base (10)..(10): gm
  modified_base (11)..(11): gm
  modified_base (12)..(12): 2'-deoxy-2'-fluoroadenosine
  modified_base (13)..(13): cm
  modified_base (14)..(14): 2'-deoxy-2'-fluorocytidine
  modified_base (15)..(15): 2'-O-methyladenosine
  modified_base (16)..(16): 2'-deoxy-2'-fluorocytidine
  modified_base (17)..(17): um
  modified_base (18)..(18): 2'-deoxy-2'-fluoroguanosine
  modified_base (19)..(19): um
  modified_base (20)..(20): 2'-deoxy-2'-fluoroguanosine
  modified_base (21)..(21): gm
  modified_base (22)..(22): 2'-deoxy-2'-fluoroadenosine
  misc_feature (22)..(23): 5'-phosphonothioate
  modified_base (23)..(23): 2'-O-methyladenosine
uuuuuaacgggaccacuguggaa

SEQ ID NO: 6210 - RNA, 23 nt, Artificial Sequence
  siRNA antisense strand against b2GPI
  modified_base (1)..(1): 2'-deoxy-2'-fluoroguanosine
  modified_base (2)..(2): um
  misc_feature (2)..(3): 5'-phosphonothioate
  modified_base (3)..(3): 2'-deoxy-2'-fluorouridine
  modified_base (4)..(4): um
  modified_base (5)..(5): 2'-deoxy-2'-fluorouridine
  modified_base (6)..(6): um
  modified_base (7)..(7): 2'-deoxy-2'-fluoroadenosine
  modified_base (8)..(8): 2'-O-methyladenosine
  modified_base (9)..(9): 2'-deoxy-2'-fluorocytidine
  modified_base (10)..(10): gm
  modified_base (11)..(11): gm
  modified_base (12)..(12): 2'-deoxy-2'-fluoroguanosine
  modified_base (13)..(13): 2'-O-methyladenosine
  modified_base (14)..(14): 2'-deoxy-2'-fluorocytidine
  modified_base (15)..(15): cm
  modified_base (16)..(16): 2'-deoxy-2'-fluoroadenosine
  modified_base (17)..(17): cm
  modified_base (18)..(18): 2'-deoxy-2'-fluorouridine
  modified_base (19)..(19): gm
  modified_base (20)..(20): 2'-deoxy-2'-fluorouridine
  modified_base (21)..(21): gm
  modified_base (22)..(22): 2'-deoxy-2'-fluoroguanosine
  misc_feature (22)..(23): 5'-phosphonothioate
  modified_base (23)..(23): 2'-O-methyladenosine
guuuuuaacgggaccacugugga

SEQ ID NO: 6211 - RNA, 23 nt, Artificial Sequence
  siRNA antisense strand against b2GPI
  modified_base (1)..(1): 2'-deoxy-2'-fluorouridine
  modified_base (2)..(2): gm
  misc_feature (2)..(3): 5'-phosphonothioate
  modified_base (3)..(3): 2'-deoxy-2'-fluorouridine
  modified_base (4)..(4): um
  modified_base (5)..(5): 2'-deoxy-2'-fluorouridine
  modified_base (6)..(6): um
  modified_base (7)..(7): 2'-deoxy-2'-fluorouridine
  modified_base (8)..(8): 2'-O-methyladenosine
  modified_base (9)..(9): 2'-deoxy-2'-fluoroadenosine
  modified_base (10)..(10): cm
  modified_base (11)..(11): gm
  modified_base (12)..(12): 2'-deoxy-2'-fluoroguanosine
  modified_base (13)..(13): gm
  modified_base (14)..(14): 2'-deoxy-2'-fluoroadenosine
  modified_base (15)..(15): cm
  modified_base (16)..(16): 2'-deoxy-2'-fluorocytidine
  modified_base (17)..(17): 2'-O-methyladenosine
  modified_base (18)..(18): 2'-deoxy-2'-fluorocytidine
  modified_base (19)..(19): um
  modified_base (20)..(20): 2'-deoxy-2'-fluoroguanosine
  modified_base (21)..(21): um
  modified_base (22)..(22): 2'-deoxy-2'-fluoroguanosine
  misc_feature (22)..(23): 5'-phosphonothioate
  modified_base (23)..(23): gm
uguuuuuaacgggaccacugugg

SEQ ID NO: 6212 - RNA, 23 nt, Artificial Sequence
  siRNA antisense strand against b2GPI
  modified_base (1)..(1): 2'-deoxy-2'-fluoroadenosine
  modified_base (2)..(2): um
  misc_feature (2)..(3): 5'-phosphonothioate
  modified_base (3)..(3): 2'-deoxy-2'-fluoroguanosine
  modified_base (4)..(4): um
  modified_base (5)..(5): 2'-deoxy-2'-fluorouridine
  modified_base (6)..(6): um
  modified_base (7)..(7): 2'-deoxy-2'-fluorouridine
  modified_base (8)..(8): um
  modified_base (9)..(9): 2'-deoxy-2'-fluoroadenosine
  modified_base (10)..(10): 2'-O-methyladenosine
  modified_base (11)..(11): cm
  modified_base (12)..(12): 2'-deoxy-2'-fluoroguanosine
  modified_base (13)..(13): gm
  modified_base (14)..(14): 2'-deoxy-2'-fluoroguanosine
  modified_base (15)..(15): 2'-O-methyladenosine
  modified_base (16)..(16): 2'-deoxy-2'-fluorocytidine
  modified_base (17)..(17): cm
  modified_base (18)..(18): 2'-deoxy-2'-fluoroadenosine
  modified_base (19)..(19): cm
  modified_base (20)..(20): 2'-deoxy-2'-fluorouridine
  modified_base (21)..(21): gm
  modified_base (22)..(22): 2'-deoxy-2'-fluorouridine
  misc_feature (22)..(23): 5'-phosphonothioate
  modified_base (23)..(23): gm
auguuuuuaacgggaccacugug

SEQ ID NO: 6213 - RNA, 23 nt, Artificial Sequence
  siRNA antisense strand against b2GPI
  modified_base (1)..(1): 2'-deoxy-2'-fluoroadenosine
  modified_base (2)..(2): 2'-O-methyladenosine
  misc_feature (2)..(3): 5'-phosphonothioate
  modified_base (3)..(3): 2'-deoxy-2'-fluorouridine
  modified_base (4)..(4): gm
  modified_base (5)..(5): 2'-deoxy-2'-fluorouridine
  modified_base (6)..(6): um
  modified_base (7)..(7): 2'-deoxy-2'-fluorouridine
  modified_base (8)..(8): um
  modified_base (9)..(9): 2'-deoxy-2'-fluorouridine
  modified_base (10)..(10): 2'-O-methyladenosine
  modified_base (11)..(11): 2'-O-methyladenosine
  modified_base (12)..(12): 2'-deoxy-2'-fluorocytidine
  modified_base (13)..(13): gm
  modified_base (14)..(14): 2'-deoxy-2'-fluoroguanosine
  modified_base (15)..(15): gm
  modified_base (16)..(16): 2'-deoxy-2'-fluoroadenosine
  modified_base (17)..(17): cm
  modified_base (18)..(18): 2'-deoxy-2'-fluorocytidine
  modified_base (19)..(19): 2'-O-methyladenosine
  modified_base (20)..(20): 2'-deoxy-2'-fluorocytidine
  modified_base (21)..(21): um
  modified_base (22)..(22): 2'-deoxy-2'-fluoroguanosine
  misc_feature (22)..(23): 5'-phosphonothioate
  modified_base (23)..(23): um
aauguuuuuaacgggaccacugu

SEQ ID NO: 6214 - RNA, 23 nt, Artificial Sequence
  siRNA antisense strand against b2GPI
  modified_base (1)..(1): 2'-deoxy-2'-fluoroguanosine
  modified_base (2)..(2): 2'-O-methyladenosine
  misc_feature (2)..(3): 5'-phosphonothioate
  modified_base (3)..(3): 2'-deoxy-2'-fluoroadenosine
  modified_base (4)..(4): um
  modified_base (5)..(5): 2'-deoxy-2'-fluoroguanosine
  modified_base (6)..(6): um
  modified_base (7)..(7): 2'-deoxy-2'-fluorouridine
  modified_base (8)..(8): um
  modified_base (9)..(9): 2'-deoxy-2'-fluorouridine
  modified_base (10)..(10): um
  modified_base (11)..(11): 2'-O-methyladenosine
  modified_base (12)..(12): 2'-deoxy-2'-fluoroadenosine
  modified_base (13)..(13): cm
  modified_base (14)..(14): 2'-deoxy-2'-fluoroguanosine
  modified_base (15)..(15): gm
  modified_base (16)..(16): 2'-deoxy-2'-fluoroguanosine
  modified_base (17)..(17): 2'-O-methyladenosine
  modified_base (18)..(18): 2'-deoxy-2'-fluorocytidine
  modified_base (19)..(19): cm
  modified_base (20)..(20): 2'-deoxy-2'-fluoroadenosine
  modified_base (21)..(21): cm
  modified_base (22)..(22): 2'-deoxy-2'-fluorouridine
  misc_feature (22)..(23): 5'-phosphonothioate
  modified_base (23)..(23): gm
gaauguuuuuaacgggaccacug

SEQ ID NO: 6215 - RNA, 23 nt, Artificial Sequence
  siRNA antisense strand against b2GPI
  modified_base (1)..(1): 2'-deoxy-2'-fluoroadenosine
  modified_base (2)..(2): gm
  misc_feature (2)..(3): 5'-phosphonothioate
  modified_base (3)..(3): 2'-deoxy-2'-fluoroadenosine
  modified_base (4)..(4): 2'-O-methyladenosine
  modified_base (5)..(5): 2'-deoxy-2'-fluorouridine
  modified_base (6)..(6): gm
  modified_base (7)..(7): 2'-deoxy-2'-fluorouridine
  modified_base (8)..(8): um
  modified_base (9)..(9): 2'-deoxy-2'-fluorouridine
  modified_base (10)..(10): um
  modified_base (11)..(11): um
  modified_base (12)..(12): 2'-deoxy-2'-fluoroadenosine
  modified_base (13)..(13): 2'-O-methyladenosine
  modified_base (14)..(14): 2'-deoxy-2'-fluorocytidine
  modified_base (15)..(15): gm
  modified_base (16)..(16): 2'-deoxy-2'-fluoroguanosine
  modified_base (17)..(17): gm
  modified_base (18)..(18): 2'-deoxy-2'-fluoroadenosine
  modified_base (19)..(19): cm
  modified_base (20)..(20): 2'-deoxy-2'-fluorocytidine
  modified_base (21)..(21): 2'-O-methyladenosine
  modified_base (22)..(22): 2'-deoxy-2'-fluorocytidine
  misc_feature (22)..(23): 5'-phosphonothioate
  modified_base (23)..(23): um
agaauguuuuuaacgggaccacu

SEQ ID NO: 6216 - RNA, 23 nt, Artificial Sequence
  siRNA antisense strand against b2GPI
  modified_base (1)..(1): 2'-deoxy-2'-fluorouridine
  modified_base (2)..(2): 2'-O-methyladenosine
  misc_feature (2)..(3): 5'-phosphonothioate
  modified_base (3)..(3): 2'-deoxy-2'-fluoroguanosine
  modified_base (4)..(4): 2'-O-methyladenosine
  modified_base (5)..(5): 2'-deoxy-2'-fluoroadenosine
  modified_base (6)..(6): um
  modified_base (7)..(7): 2'-deoxy-2'-fluoroguanosine
  modified_base (8)..(8): um
  modified_base (9)..(9): 2'-deoxy-2'-fluorouridine
  modified_base (10)..(10): um
  modified_base (11)..(11): um
  modified_base (12)..(12): 2'-deoxy-2'-fluorouridine
  modified_base (13)..(13): 2'-O-methyladenosine
  modified_base (14)..(14): 2'-deoxy-2'-fluoroadenosine
  modified_base (15)..(15): cm
  modified_base (16)..(16): 2'-deoxy-2'-fluoroguanosine
  modified_base (17)..(17): gm
  modified_base (18)..(18): 2'-deoxy-2'-fluoroguanosine
  modified_base (19)..(19): 2'-O-methyladenosine
  modified_base (20)..(20): 2'-deoxy-2'-fluorocytidine
  modified_base (21)..(21): cm
  modified_base (22)..(22): 2'-deoxy-2'-fluoroadenosine
  misc_feature (22)..(23): 5'-phosphonothioate
  modified_base (23)..(23): cm
uagaauguuuuuaacgggaccac

SEQ ID NO: 6217 - RNA, 23 nt, Artificial Sequence
  siRNA antisense strand against b2GPI
  modified_base (1)..(1): 2'-deoxy-2'-fluoroadenosine
  modified_base (2)..(2): um
  misc_feature (2)..(3): 5'-phosphonothioate
  modified_base (3)..(3): 2'-deoxy-2'-fluoroadenosine
  modified_base (4)..(4): gm
  modified_base (5)..(5): 2'-deoxy-2'-fluoroadenosine
  modified_base (6)..(6): 2'-O-methyladenosine
  modified_base (7)..(7): 2'-deoxy-2'-fluorouridine
  modified_base (8)..(8): gm
  modified_base (9)..(9): 2'-deoxy-2'-fluorouridine
  modified_base (10)..(10): um
  modified_base (11)..(11): um
  modified_base (12)..(12): 2'-deoxy-2'-fluorouridine
  modified_base (13)..(13): um
  modified_base (14)..(14): 2'-deoxy-2'-fluoroadenosine
  modified_base (15)..(15): 2'-O-methyladenosine
  modified_base (16)..(16): 2'-deoxy-2'-fluorocytidine
  modified_base (17)..(17): gm
  modified_base (18)..(18): 2'-deoxy-2'-fluoroguanosine
  modified_base (19)..(19): gm
  modified_base (20)..(20): 2'-deoxy-2'-fluoroadenosine
  modified_base (21)..(21): cm
  modified_base (22)..(22): 2'-deoxy-2'-fluorocytidine
  misc_feature (22)..(23): 5'-phosphonothioate
  modified_base (23)..(23): 2'-O-methyladenosine
auagaauguuuuuaacgggacca

SEQ ID NO: 6218 - RNA, 23 nt, Artificial Sequence
  siRNA antisense strand against b2GPI
  modified_base (1)..(1): 2'-deoxy-2'-fluorocytidine
  modified_base (2)..(2): 2'-O-methyladenosine
  misc_feature (2)..(3): 5'-phosphonothioate
  modified_base (3)..(3): 2'-deoxy-2'-fluorouridine
  modified_base (4)..(4): 2'-O-methyladenosine
  modified_base (5)..(5): 2'-deoxy-2'-fluoroguanosine
  modified_base (6)..(6): 2'-O-methyladenosine
  modified_base (7)..(7): 2'-deoxy-2'-fluoroadenosine
  modified_base (8)..(8): um
  modified_base (9)..(9): 2'-deoxy-2'-fluoroguanosine
  modified_base (10)..(10): um
  modified_base (11)..(11): um
  modified_base (12)..(12): 2'-deoxy-2'-fluorouridine
  modified_base (13)..(13): um
  modified_base (14)..(14): 2'-deoxy-2'-fluorouridine
  modified_base (15)..(15): 2'-O-methyladenosine
  modified_base (16)..(16): 2'-deoxy-2'-fluoroadenosine
  modified_base (17)..(17): cm
  modified_base (18)..(18): 2'-deoxy-2'-fluoroguanosine
  modified_base (19)..(19): gm
  modified_base (20)..(20): 2'-deoxy-2'-fluoroguanosine
  modified_base (21)..(21): 2'-O-methyladenosine
  modified_base (22)..(22): 2'-deoxy-2'-fluorocytidine
  misc_feature (22)..(23): 5'-phosphonothioate
  modified_base (23)..(23): cm
cauagaauguuuuuaacgggacc

SEQ ID NO: 6219 - RNA, 23 nt, Artificial Sequence
  siRNA antisense strand against b2GPI
  modified_base (1)..(1): 2'-deoxy-2'-fluorouridine
  modified_base (2)..(2): cm
  misc_feature (2)..(3): 5'-phosphonothioate
  modified_base (3)..(3): 2'-deoxy-2'-fluoroadenosine
  modified_base (4)..(4): um
  modified_base (5)..(5): 2'-deoxy-2'-fluoroadenosine
  modified_base (6)..(6): gm
  modified_base (7)..(7): 2'-deoxy-2'-fluoroadenosine
  modified_base (8)..(8): 2'-O-methyladenosine
  modified_base (9)..(9): 2'-deoxy-2'-fluorouridine
  modified_base (10)..(10): gm
  modified_base (11)..(11): um
  modified_base (12)..(12): 2'-deoxy-2'-fluorouridine
  modified_base (13)..(13): um
  modified_base (14)..(14): 2'-deoxy-2'-fluorouridine
  modified_base (15)..(15): um
  modified_base (16)..(16): 2'-deoxy-2'-fluoroadenosine
  modified_base (17)..(17): 2'-O-methyladenosine
  modified_base (18)..(18): 2'-deoxy-2'-fluorocytidine
  modified_base (19)..(19): gm
  modified_base (20)..(20): 2'-deoxy-2'-fluoroguanosine
  modified_base (21)..(21): gm
  modified_base (22)..(22): 2'-deoxy-2'-fluoroadenosine
  misc_feature (22)..(23): 5'-phosphonothioate
  modified_base (23)..(23): cm
ucauagaauguuuuuaacgggac

SEQ ID NO: 6220 - RNA, 23 nt, Artificial Sequence
  siRNA antisense strand against b2GPI
  modified_base (1)..(1): 2'-deoxy-2'-fluorouridine
  modified_base (2)..(2): cm
  misc_feature (2)..(3): 5'-phosphonothioate
  modified_base (3)..(3): 2'-deoxy-2'-fluorouridine
  modified_base (4)..(4): cm
  modified_base (5)..(5): 2'-deoxy-2'-fluorocytidine
  modified_base (6)..(6): um
  modified_base (7)..(7): 2'-deoxy-2'-fluoroguanosine
  modified_base (8)..(8): gm
  modified_base (9)..(9): 2'-deoxy-2'-fluorocytidine
  modified_base (10)..(10): um
  modified_base (11)..(11): cm
  modified_base (12)..(12): 2'-deoxy-2'-fluoroadenosine
  modified_base (13)..(13): um
  modified_base (14)..(14): 2'-deoxy-2'-fluoroadenosine
  modified_base (15)..(15): gm
  modified_base (16)..(16): 2'-deoxy-2'-fluoroadenosine
  modified_base (17)..(17): 2'-O-methyladenosine
  modified_base (18)..(18): 2'-deoxy-2'-fluorouridine
  modified_base (19)..(19): gm
  modified_base (20)..(20): 2'-deoxy-2'-fluorouridine
  modified_base (21)..(21): um
  modified_base (22)..(22): 2'-deoxy-2'-fluorouridine
  misc_feature (22)..(23): 5'-phosphonothioate
  modified_base (23)..(23): um
ucuccuggcucauagaauguuuu

SEQ ID NO: 6221 - RNA, 23 nt, Artificial Sequence
  siRNA antisense strand against b2GPI
  modified_base (1)..(1): 2'-deoxy-2'-fluorouridine
  modified_base (2)..(2): um
  misc_feature (2)..(3): 5'-phosphonothioate
  modified_base (3)..(3): 2'-deoxy-2'-fluorocytidine
  modified_base (4)..(4): um
  modified_base (5)..(5): 2'-deoxy-2'-fluorocytidine
  modified_base (6)..(6): cm
  modified_base (7)..(7): 2'-deoxy-2'-fluorouridine
  modified_base (8)..(8): gm
  modified_base (9)..(9): 2'-deoxy-2'-fluoroguanosine
  modified_base (10)..(10): cm
  modified_base (11)..(11): um
  modified_base (12)..(12): 2'-deoxy-2'-fluorocytidine
  modified_base (13)..(13): 2'-O-methyladenosine
  modified_base (14)..(14): 2'-deoxy-2'-fluorouridine
  modified_base (15)..(15): 2'-O-methyladenosine
  modified_base (16)..(16): 2'-deoxy-2'-fluoroguanosine
  modified_base (17)..(17): 2'-O-methyladenosine
  modified_base (18)..(18): 2'-deoxy-2'-fluoroadenosine
  modified_base (19)..(19): um
  modified_base (20)..(20): 2'-deoxy-2'-fluoroguanosine
  modified_base (21)..(21): um
  modified_base (22)..(22): 2'-deoxy-2'-fluorouridine
  misc_feature (22)..(23): 5'-phosphonothioate
  modified_base (23)..(23): um
uucuccuggcucauagaauguuu

SEQ ID NO: 6222 - RNA, 23 nt, Artificial Sequence
  siRNA antisense strand against b2GPI
  modified_base (1)..(1): 2'-deoxy-2'-fluorocytidine
  modified_base (2)..(2): um
  misc_feature (2)..(3): 5'-phosphonothioate
  modified_base (3)..(3): 2'-deoxy-2'-fluorocytidine
  modified_base (4)..(4): um
  modified_base (5)..(5): 2'-deoxy-2'-fluorouridine
  modified_base (6)..(6): cm
  modified_base (7)..(7): 2'-deoxy-2'-fluorouridine
  modified_base (8)..(8): cm
  modified_base (9)..(9): 2'-deoxy-2'-fluorocytidine
  modified_base (10)..(10): um
  modified_base (11)..(11): gm
  modified_base (12)..(12): 2'-deoxy-2'-fluoroguanosine
  modified_base (13)..(13): cm
  modified_base (14)..(14): 2'-deoxy-2'-fluorouridine
  modified_base (15)..(15): cm
  modified_base (16)..(16): 2'-deoxy-2'-fluoroadenosine
  modified_base (17)..(17): um
  modified_base (18)..(18): 2'-deoxy-2'-fluoroadenosine
  modified_base (19)..(19): gm
  modified_base (20)..(20): 2'-deoxy-2'-fluoroadenosine
  modified_base (21)..(21): 2'-O-methyladenosine
  modified_base (22)..(22): 2'-deoxy-2'-fluorouridine
  misc_feature (22)..(23): 5'-phosphonothioate
  modified_base (23)..(23): gm
cucuucuccuggcucauagaaug

SEQ ID NO: 6223 - RNA, 23 nt, Artificial Sequence
  siRNA antisense strand against b2GPI
  modified_base (1)..(1): 2'-deoxy-2'-fluorouridine
  modified_base (2)..(2): cm
  misc_feature (2)..(3): 5'-phosphonothioate
  modified_base (3)..(3): 2'-deoxy-2'-fluorouridine
  modified_base (4)..(4): cm
  modified_base (5)..(5): 2'-deoxy-2'-fluorouridine
  modified_base (6)..(6): um
  modified_base (7)..(7): 2'-deoxy-2'-fluorocytidine
  modified_base (8)..(8): um
  modified_base (9)..(9): 2'-deoxy-2'-fluorocytidine
  modified_base (10)..(10): cm
  modified_base (11)..(11): um
  modified_base (12)..(12): 2'-deoxy-2'-fluoroguanosine
  modified_base (13)..(13): gm
  modified_base (14)..(14): 2'-deoxy-2'-fluorocytidine
  modified_base (15)..(15): um
  modified_base (16)..(16): 2'-deoxy-2'-fluorocytidine
  modified_base (17)..(17): 2'-O-methyladenosine
  modified_base (18)..(18): 2'-deoxy-2'-fluorouridine
  modified_base (19)..(19): 2'-O-methyladenosine
  modified_base (20)..(20): 2'-deoxy-2'-fluoroguanosine
  modified_base (21)..(21): 2'-O-methyladenosine
  modified_base (22)..(22): 2'-deoxy-2'-fluoroadenosine
  misc_feature (22)..(23): 5'-phosphonothioate
  modified_base (23)..(23): um
ucucuucuccuggcucauagaau

SEQ ID NO: 6224 - RNA, 23 nt, Artificial Sequence
  siRNA antisense strand against b2GPI
  modified_base (1)..(1): 2'-deoxy-2'-fluoroadenosine
  modified_base (2)..(2): um
  misc_feature (2)..(3): 5'-phosphonothioate
  modified_base (3)..(3): 2'-deoxy-2'-fluorocytidine
  modified_base (4)..(4): um
  modified_base (5)..(5): 2'-deoxy-2'-fluorocytidine
  modified_base (6)..(6): um
  modified_base (7)..(7): 2'-deoxy-2'-fluorouridine
  modified_base (8)..(8): cm
  modified_base (9)..(9): 2'-deoxy-2'-fluorouridine
  modified_base (10)..(10): cm
  modified_base (11)..(11): cm
  modified_base (12)..(12): 2'-deoxy-2'-fluorouridine
  modified_base (13)..(13): gm
  modified_base (14)..(14): 2'-deoxy-2'-fluoroguanosine
  modified_base (15)..(15): cm
  modified_base (16)..(16): 2'-deoxy-2'-fluorouridine
  modified_base (17)..(17): cm
  modified_base (18)..(18): 2'-deoxy-2'-fluoroadenosine
  modified_base (19)..(19): um
  modified_base (20)..(20): 2'-deoxy-2'-fluoroadenosine
  modified_base (21)..(21): gm
  modified_base (22)..(22): 2'-deoxy-2'-fluoroadenosine
  misc_feature (22)..(23): 5'-phosphonothioate
  modified_base (23)..(23): 2'-O-methyladenosine
aucucuucuccuggcucauagaa

SEQ ID NO: 6225 - RNA, 23 nt, Artificial Sequence
  siRNA antisense strand against b2GPI
  modified_base (1)..(1): 2'-deoxy-2'-fluoroadenosine
  modified_base (2)..(2): 2'-O-methyladenosine
  misc_feature (2)..(3): 5'-phosphonothioate
  modified_base (3)..(3): 2'-deoxy-2'-fluorouridine
  modified_base (4)..(4): cm
  modified_base (5)..(5): 2'-deoxy-2'-fluorouridine
  modified_base (6)..(6): cm
  modified_base (7)..(7): 2'-deoxy-2'-fluorouridine
  modified_base (8)..(8): um
  modified_base (9)..(9): 2'-deoxy-2'-fluorocytidine
  modified_base (10)..(10): um
  modified_base (11)..(11): cm
  modified_base (12)..(12): 2'-deoxy-2'-fluorocytidine
  modified_base (13)..(13): um
  modified_base (14)..(14): 2'-deoxy-2'-fluoroguanosine
  modified_base (15)..(15): gm
  modified_base (16)..(16): 2'-deoxy-2'-fluorocytidine
  modified_base (17)..(17): um
  modified_base (18)..(18): 2'-deoxy-2'-fluorocytidine
  modified_base (19)..(19): 2'-O-methyladenosine
  modified_base (20)..(20): 2'-deoxy-2'-fluorouridine
  modified_base (21)..(21): 2'-O-methyladenosine
  modified_base (22)..(22): 2'-deoxy-2'-fluoroguanosine
  misc_feature (22)..(23): 5'-phosphonothioate
  modified_base (23)..(23): 2'-O-methyladenosine
aaucucuucuccuggcucauaga

SEQ ID NO: 6226 - RNA, 23 nt, Artificial Sequence
  siRNA antisense strand against b2GPI
  modified_base (1)..(1): 2'-deoxy-2'-fluorouridine
  modified_base (2)..(2): 2'-O-methyladenosine
  misc_feature (2)..(3): 5'-phosphonothioate
  modified_base (3)..(3): 2'-deoxy-2'-fluoroadenosine
  modified_base (4)..(4): um
  modified_base (5)..(5): 2'-deoxy-2'-fluorocytidine
  modified_base (6)..(6): um
  modified_base (7)..(7): 2'-deoxy-2'-fluorocytidine
  modified_base (8)..(8): um
  modified_base (9)..(9): 2'-deoxy-2'-fluorouridine
  modified_base (10)..(10): cm
  modified_base (11)..(11): um
  modified_base (12)..(12): 2'-deoxy-2'-fluorocytidine
  modified_base (13)..(13): cm
  modified_base (14)..(14): 2'-deoxy-2'-fluorouridine
  modified_base (15)..(15): gm
  modified_base (16)..(16): 2'-deoxy-2'-fluoroguanosine
  modified_base (17)..(17): cm
  modified_base (18)..(18): 2'-deoxy-2'-fluorouridine
  modified_base (19)..(19): cm
  modified_base (20)..(20): 2'-deoxy-2'-fluoroadenosine
  modified_base (21)..(21): um
  modified_base (22)..(22): 2'-deoxy-2'-fluoroadenosine
  misc_feature (22)..(23): 5'-phosphonothioate
  modified_base (23)..(23): gm
uaaucucuucuccuggcucauag

SEQ ID NO: 6227 - RNA, 23 nt, Artificial Sequence
  siRNA antisense strand against b2GPI
  modified_base (1)..(1): 2'-deoxy-2'-fluorocytidine
  modified_base (2)..(2): gm
  misc_feature (2)..(3): 5'-phosphonothioate
  modified_base (3)..(3): 2'-deoxy-2'-fluorouridine
  modified_base (4)..(4): 2'-O-methyladenosine
  modified_base (5)..(5): 2'-deoxy-2'-fluoroadenosine
  modified_base (6)..(6): um
  modified_base (7)..(7): 2'-deoxy-2'-fluorocytidine
  modified_base (8)..(8): um
  modified_base (9)..(9): 2'-deoxy-2'-fluorocytidine
  modified_base (10)..(10): um
  modified_base (11)..(11): um
  modified_base (12)..(12): 2'-deoxy-2'-fluorocytidine
  modified_base (13)..(13): um
  modified_base (14)..(14): 2'-deoxy-2'-fluorocytidine
  modified_base (15)..(15): cm
  modified_base (16)..(16): 2'-deoxy-2'-fluorouridine
  modified_base (17)..(17): gm
  modified_base (18)..(18): 2'-deoxy-2'-fluoroguanosine
  modified_base (19)..(19): cm
  modified_base (20)..(20): 2'-deoxy-2'-fluorouridine
  modified_base (21)..(21): cm
  modified_base (22)..(22): 2'-deoxy-2'-fluoroadenosine
  misc_feature (22)..(23): 5'-phosphonothioate
  modified_base (23)..(23): um
cguaaucucuucuccuggcucau

SEQ ID NO: 6228 - RNA, 23 nt, Artificial Sequence
  siRNA antisense strand against b2GPI
  modified_base (1)..(1): 2'-deoxy-2'-fluoroadenosine
  modified_base (2)..(2): cm
  misc_feature (2)..(3): 5'-phosphonothioate
  modified_base (3)..(3): 2'-deoxy-2'-fluoroguanosine
  modified_base (4)..(4): um
  modified_base (5)..(5): 2'-deoxy-2'-fluoroadenosine
  modified_base (6)..(6): 2'-O-methyladenosine
  modified_base (7)..(7): 2'-deoxy-2'-fluorouridine
  modified_base (8)..(8): cm
  modified_base (9)..(9): 2'-deoxy-2'-fluorouridine
  modified_base (10)..(10): cm
  modified_base (11)..(11): um
  modified_base (12)..(12): 2'-deoxy-2'-fluorouridine
  modified_base (13)..(13): cm
  modified_base (14)..(14): 2'-deoxy-2'-fluorouridine
  modified_base (15)..(15): cm
  modified_base (16)..(16): 2'-deoxy-2'-fluorocytidine
  modified_base (17)..(17): um
  modified_base (18)..(18): 2'-deoxy-2'-fluoroguanosine
  modified_base (19)..(19): gm
  modified_base (20)..(20): 2'-deoxy-2'-fluorocytidine
  modified_base (21)..(21): um
  modified_base (22)..(22): 2'-deoxy-2'-fluorocytidine
  misc_feature (22)..(23): 5'-phosphonothioate
  modified_base (23)..(23): 2'-O-methyladenosine
acguaaucucuucuccuggcuca

SEQ ID NO: 6229 - RNA, 23 nt, Artificial Sequence
  siRNA antisense strand against b2GPI
  modified_base (1)..(1): 2'-deoxy-2'-fluorouridine
  modified_base (2)..(2): 2'-O-methyladenosine
  misc_feature (2)..(3): 5'-phosphonothioate
  modified_base (3)..(3): 2'-deoxy-2'-fluorocytidine
  modified_base (4)..(4): gm
  modified_base (5)..(5): 2'-deoxy-2'-fluorouridine
  modified_base (6)..(6): 2'-O-methyladenosine
  modified_base (7)..(7): 2'-deoxy-2'-fluoroadenosine
  modified_base (8)..(8): um
  modified_base (9)..(9): 2'-deoxy-2'-fluorocytidine
  modified_base (10)..(10): um
  modified_base (11)..(11): cm
  modified_base (12)..(12): 2'-deoxy-2'-fluorouridine
  modified_base (13)..(13): um
  modified_base (14)..(14): 2'-deoxy-2'-fluorocytidine
  modified_base (15)..(15): um
  modified_base (16)..(16): 2'-deoxy-2'-fluorocytidine
  modified_base (17)..(17): cm
  modified_base (18)..(18): 2'-deoxy-2'-fluorouridine
  modified_base (19)..(19): gm
  modified_base (20)..(20): 2'-deoxy-2'-fluoroguanosine
  modified_base (21)..(21): cm
  modified_base (22)..(22): 2'-deoxy-2'-fluorouridine
  misc_feature (22)..(23): 5'-phosphonothioate
  modified_base (23)..(23): cm
uacguaaucucuucuccuggcuc

SEQ ID NO: 6230 - RNA, 23 nt, Artificial Sequence
  siRNA antisense strand against b2GPI
  modified_base (1)..(1): 2'-deoxy-2'-fluoroadenosine
  modified_base (2)..(2): um
  misc_feature (2)..(3): 5'-phosphonothioate
  modified_base (3)..(3): 2'-deoxy-2'-fluoroadenosine
  modified_base (4)..(4): cm
  modified_base (5)..(5): 2'-deoxy-2'-fluoroguanosine
  modified_base (6)..(6): um
  modified_base (7)..(7): 2'-deoxy-2'-fluoroadenosine
  modified_base (8)..(8): 2'-O-methyladenosine
  modified_base (9)..(9): 2'-deoxy-2'-fluorouridine
  modified_base (10)..(10): cm
  modified_base (11)..(11): um
  modified_base (12)..(12): 2'-deoxy-2'-fluorocytidine
  modified_base (13)..(13): um
  modified_base (14)..(14): 2'-deoxy-2'-fluorouridine
  modified_base (15)..(15): cm
  modified_base (16)..(16): 2'-deoxy-2'-fluorouridine
  modified_base (17)..(17): cm
  modified_base (18)..(18): 2'-deoxy-2'-fluorocytidine
  modified_base (19)..(19): um
  modified_base (20)..(20): 2'-deoxy-2'-fluoroguanosine
  modified_base (21)..(21): gm
  modified_base (22)..(22): 2'-deoxy-2'-fluorocytidine
  misc_feature (22)..(23): 5'-phosphonothioate
  modified_base (23)..(23): um
auacguaaucucuucuccuggcu

SEQ ID NO: 6231 - RNA, 23 nt, Artificial Sequence
  siRNA antisense strand against b2GPI
  modified_base (1)..(1): 2'-deoxy-2'-fluoroadenosine
  modified_base (2)..(2): 2'-O-methyladenosine
  misc_feature (2)..(3): 5'-phosphonothioate
  modified_base (3)..(3): 2'-deoxy-2'-fluorouridine
  modified_base (4)..(4): 2'-O-methyladenosine
  modified_base (5)..(5): 2'-deoxy-2'-fluorocytidine
  modified_base (6)..(6): gm
  modified_base (7)..(7): 2'-deoxy-2'-fluorouridine
  modified_base (8)..(8): 2'-O-methyladenosine
  modified_base (9)..(9): 2'-deoxy-2'-fluoroadenosine
  modified_base (10)..(10): um
  modified_base (11)..(11): cm
  modified_base (12)..(12): 2'-deoxy-2'-fluorouridine
  modified_base (13)..(13): cm
  modified_base (14)..(14): 2'-deoxy-2'-fluorouridine
  modified_base (15)..(15): um
  modified_base (16)..(16): 2'-deoxy-2'-fluorocytidine
  modified_base (17)..(17): um
  modified_base (18)..(18): 2'-deoxy-2'-fluorocytidine
  modified_base (19)..(19): cm
  modified_base (20)..(20): 2'-deoxy-2'-fluorouridine
  modified_base (21)..(21): gm
  modified_base (22)..(22): 2'-deoxy-2'-fluoroguanosine
  misc_feature (22)..(23): 5'-phosphonothioate
  modified_base (23)..(23): cm
aauacguaaucucuucuccuggc

SEQ ID NO: 6232 - RNA, 23 nt, Artificial Sequence
  siRNA antisense strand against b2GPI
  modified_base (1)..(1): 2'-deoxy-2'-fluoroguanosine
  modified_base (2)..(2): 2'-O-methyladenosine
  misc_feature (2)..(3): 5'-phosphonothioate
  modified_base (3)..(3): 2'-deoxy-2'-fluoroadenosine
  modified_base (4)..(4): um
  modified_base (5)..(5): 2'-deoxy-2'-fluoroadenosine
  modified_base (6)..(6): cm
  modified_base (7)..(7): 2'-deoxy-2'-fluoroguanosine
  modified_base (8)..(8): um
  modified_base (9)..(9): 2'-deoxy-2'-fluoroadenosine
  modified_base (10)..(10): 2'-O-methyladenosine
  modified_base (11)..(11): um
  modified_base (12)..(12): 2'-deoxy-2'-fluorocytidine
  modified_base (13)..(13): um
  modified_base (14)..(14): 2'-deoxy-2'-fluorocytidine
  modified_base (15)..(15): um
  modified_base (16)..(16): 2'-deoxy-2'-fluorouridine
  modified_base (17)..(17): cm
  modified_base (18)..(18): 2'-deoxy-2'-fluorouridine
  modified_base (19)..(19): cm
  modified_base (20)..(20): 2'-deoxy-2'-fluorocytidine
  modified_base (21)..(21): um
  modified_base (22)..(22): 2'-deoxy-2'-fluoroguanosine
  misc_feature (22)..(23): 5'-phosphonothioate
  modified_base (23)..(23): gm
gaauacguaaucucuucuccugg

SEQ ID NO: 6233 - RNA, 23 nt, Artificial Sequence
  siRNA antisense strand against b2GPI
  modified_base (1)..(1): 2'-deoxy-2'-fluoroguanosine
  modified_base (2)..(2): gm
  misc_feature (2)..(3): 5'-phosphonothioate
  modified_base (3)..(3): 2'-deoxy-2'-fluoroadenosine
  modified_base (4)..(4): 2'-O-methyladenosine
  modified_base (5)..(5): 2'-deoxy-2'-fluorouridine
  modified_base (6)..(6): 2'-O-methyladenosine
  modified_base (7)..(7): 2'-deoxy-2'-fluorocytidine
  modified_base (8)..(8): gm
  modified_base (9)..(9): 2'-deoxy-2'-fluorouridine
  modified_base (10)..(10): 2'-O-methyladenosine
  modified_base (11)..(11): 2'-O-methyladenosine
  modified_base (12)..(12): 2'-deoxy-2'-fluorouridine
  modified_base (13)..(13): cm
  modified_base (14)..(14): 2'-deoxy-2'-fluorouridine
  modified_base (15)..(15): cm
  modified_base (16)..(16): 2'-deoxy-2'-fluorouridine
  modified_base (17)..(17): um
  modified_base (18)..(18): 2'-deoxy-2'-fluorocytidine
  modified_base (19)..(19): um
  modified_base (20)..(20): 2'-deoxy-2'-fluorocytidine
  modified_base (21)..(21): cm
  modified_base (22)..(22): 2'-deoxy-2'-fluorouridine
  misc_feature (22)..(23): 5'-phosphonothioate
  modified_base (23)..(23): gm
ggaauacguaaucucuucuccug

SEQ ID NO: 6234 - RNA, 23 nt, Artificial Sequence
  siRNA antisense strand against b2GPI
  modified_base (1)..(1): 2'-deoxy-2'-fluoroadenosine
  modified_base (2)..(2): gm
  misc_feature (2)..(3): 5'-phosphonothioate
  modified_base (3)..(3): 2'-deoxy-2'-fluoroguanosine
  modified_base (4)..(4): 2'-O-methyladenosine
  modified_base (5)..(5): 2'-deoxy-2'-fluoroadenosine
  modified_base (6)..(6): um
  modified_base (7)..(7): 2'-deoxy-2'-fluoroadenosine
  modified_base (8)..(8): cm
  modified_base (9)..(9): 2'-deoxy-2'-fluoroguanosine
  modified_base (10)..(10): um
  modified_base (11)..(11): 2'-O-methyladenosine
  modified_base (12)..(12): 2'-deoxy-2'-fluoroadenosine
  modified_base (13)..(13): um
  modified_base (14)..(14): 2'-deoxy-2'-fluorocytidine
  modified_base (15)..(15): um
  modified_base (16)..(16): 2'-deoxy-2'-fluorocytidine
  modified_base (17)..(17): um
  modified_base (18)..(18): 2'-deoxy-2'-fluorouridine
  modified_base (19)..(19): cm
  modified_base (20)..(20): 2'-deoxy-2'-fluorouridine
  modified_base (21)..(21): cm
  modified_base (22)..(22): 2'-deoxy-2'-fluorocytidine
  misc_feature (22)..(23): 5'-phosphonothioate
  modified_base (23)..(23): um
aggaauacguaaucucuucuccu

SEQ ID NO: 6235 - RNA, 23 nt, Artificial Sequence
  siRNA antisense strand against b2GPI
  modified_base (1)..(1): 2'-deoxy-2'-fluorouridine
  modified_base (2)..(2): gm
  misc_feature (2)..(3): 5'-phosphonothioate
  modified_base (3)..(3): 2'-deoxy-2'-fluorocytidine
  modified_base (4)..(4): 2'-O-methyladenosine
  modified_base (5)..(5): 2'-deoxy-2'-fluoroguanosine
  modified_base (6)..(6): gm
  modified_base (7)..(7): 2'-deoxy-2'-fluoroadenosine
  modified_base (8)..(8): 2'-O-methyladenosine
  modified_base (9)..(9): 2'-deoxy-2'-fluorouridine
  modified_base (10)..(10): 2'-O-methyladenosine
  modified_base (11)..(11): cm
  modified_base (12)..(12): 2'-deoxy-2'-fluoroguanosine
  modified_base (13)..(13): um
  modified_base (14)..(14): 2'-deoxy-2'-fluoroadenosine
  modified_base (15)..(15): 2'-O-methyladenosine
  modified_base (16)..(16): 2'-deoxy-2'-fluorouridine
  modified_base (17)..(17): cm
  modified_base (18)..(18): 2'-deoxy-2'-fluorouridine
  modified_base (19)..(19): cm
  modified_base (20)..(20): 2'-deoxy-2'-fluorouridine
  modified_base (21)..(21): um
  modified_base (22)..(22): 2'-deoxy-2'-fluorocytidine
  misc_feature (22)..(23): 5'-phosphonothioate
  modified_base (23)..(23): um
ugcaggaauacguaaucucuucu

SEQ ID NO: 6236 - RNA, 23 nt, Artificial Sequence
  siRNA antisense strand against b2GPI
  modified_base (1)..(1): 2'-deoxy-2'-fluorouridine
  modified_base (2)..(2): um
  misc_feature (2)..(3): 5'-phosphonothioate
  modified_base (3)..(3): 2'-deoxy-2'-fluoroguanosine
  modified_base (4)..(4): cm
  modified_base (5)..(5): 2'-deoxy-2'-fluoroadenosine
  modified_base (6)..(6): gm
  modified_base (7)..(7): 2'-deoxy-2'-fluoroguanosine
  modified_base (8)..(8): 2'-O-methyladenosine
  modified_base (9)..(9): 2'-deoxy-2'-fluoroadenosine
  modified_base (10)..(10): um
  modified_base (11)..(11): 2'-O-methyladenosine
  modified_base (12)..(12): 2'-deoxy-2'-fluorocytidine
  modified_base (13)..(13): gm
  modified_base (14)..(14): 2'-deoxy-2'-fluorouridine
  modified_base (15)..(15): 2'-O-methyladenosine
  modified_base (16)..(16): 2'-deoxy-2'-fluoroadenosine
  modified_base (17)..(17): um
  modified_base (18)..(18): 2'-deoxy-2'-fluorocytidine
  modified_base (19)..(19): um
  modified_base (20)..(20): 2'-deoxy-2'-fluorocytidine
  modified_base (21)..(21): um
  modified_base (22)..(22): 2'-deoxy-2'-fluorouridine
  misc_feature (22)..(23): 5'-phosphonothioate
  modified_base (23)..(23): cm
uugcaggaauacguaaucucuuc

SEQ ID NO: 6237 - RNA, 23 nt, Artificial Sequence
  siRNA antisense strand against b2GPI
  modified_base (1)..(1): 2'-deoxy-2'-fluorocytidine
  modified_base (2)..(2): um
  misc_feature (2)..(3): 5'-phosphonothioate
  modified_base (3)..(3): 2'-deoxy-2'-fluorouridine
  modified_base (4)..(4): gm
  modified_base (5)..(5): 2'-deoxy-2'-fluorocytidine
  modified_base (6)..(6): 2'-O-methyladenosine
  modified_base (7)..(7): 2'-deoxy-2'-fluoroguanosine
  modified_base (8)..(8): gm
  modified_base (9)..(9): 2'-deoxy-2'-fluoroadenosine
  modified_base (10)..(10): 2'-O-methyladenosine
  modified_base (11)..(11): um
  modified_base (12)..(12): 2'-deoxy-2'-fluoroadenosine
  modified_base (13)..(13): cm
  modified_base (14)..(14): 2'-deoxy-2'-fluoroguanosine
  modified_base (15)..(15): um
  modified_base (16)..(16): 2'-deoxy-2'-fluoroadenosine
  modified_base (17)..(17): 2'-O-methyladenosine
  modified_base (18)..(18): 2'-deoxy-2'-fluorouridine
  modified_base (19)..(19): cm
  modified_base (20)..(20): 2'-deoxy-2'-fluorouridine
  modified_base (21)..(21): cm
  modified_base (22)..(22): 2'-deoxy-2'-fluorouridine
  misc_feature (22)..(23): 5'-phosphonothioate
  modified_base (23)..(23): um
cuugcaggaauacguaaucucuu

SEQ ID NO: 6238 - RNA, 23 nt, Artificial Sequence
  siRNA antisense strand against b2GPI
  modified_base (1)..(1): 2'-deoxy-2'-fluorocytidine
  modified_base (2)..(2): cm
  misc_feature (2)..(3): 5'-phosphonothioate
  modified_base (3)..(3): 2'-deoxy-2'-fluoroguanosine
  modified_base (4)..(4): gm
  modified_base (5)..(5): 2'-deoxy-2'-fluorocytidine
  modified_base (6)..(6): um
  modified_base (7)..(7): 2'-deoxy-2'-fluorouridine
  modified_base (8)..(8): gm
  modified_base (9)..(9): 2'-deoxy-2'-fluorocytidine
  modified_base (10)..(10): 2'-O-methyladenosine
  modified_base (11)..(11): gm
  modified_base (12)..(12): 2'-deoxy-2'-fluoroguanosine
  modified_base (13)..(13): 2'-O-methyladenosine
  modified_base (14)..(14): 2'-deoxy-2'-fluoroadenosine
  modified_base (15)..(15): um
  modified_base (16)..(16): 2'-deoxy-2'-fluoroadenosine
  modified_base (17)..(17): cm
  modified_base (18)..(18): 2'-deoxy-2'-fluoroguanosine
  modified_base (19)..(19): um
  modified_base (20)..(20): 2'-deoxy-2'-fluoroadenosine
  modified_base (21)..(21): 2'-O-methyladenosine
  modified_base (22)..(22): 2'-deoxy-2'-fluorouridine
  misc_feature (22)..(23): 5'-phosphonothioate
  modified_base (23)..(23): cm
ccggcuugcaggaauacguaauc

SEQ ID NO: 6239 - RNA, 23 nt, Artificial Sequence
  siRNA antisense strand against b2GPI
  modified_base (1)..(1): 2'-deoxy-2'-fluorouridine
  modified_base (2)..(2): 2'-O-methyladenosine
  misc_feature (2)..(3): 5'-phosphonothioate
  modified_base (3)..(3): 2'-deoxy-2'-fluoroguanosine
  modified_base (4)..(4): cm
  modified_base (5)..(5): 2'-deoxy-2'-fluorocytidine
  modified_base (6)..(6): cm
  modified_base (7)..(7): 2'-deoxy-2'-fluoroguanosine
  modified_base (8)..(8): gm
  modified_base (9)..(9): 2'-deoxy-2'-fluorocytidine
  modified_base (10)..(10): um
  modified_base (11)..(11): um
  modified_base (12)..(12): 2'-deoxy-2'-fluoroguanosine
  modified_base (13)..(13): cm
  modified_base (14)..(14): 2'-deoxy-2'-fluoroadenosine
  modified_base (15)..(15): gm
  modified_base (16)..(16): 2'-deoxy-2'-fluoroguanosine
  modified_base (17)..(17): 2'-O-methyladenosine
  modified_base (18)..(18): 2'-deoxy-2'-fluoroadenosine
  modified_base (19)..(19): um
  modified_base (20)..(20): 2'-deoxy-2'-fluoroadenosine
  modified_base (21)..(21): cm
  modified_base (22)..(22): 2'-deoxy-2'-fluoroguanosine
  misc_feature (22)..(23): 5'-phosphonothioate
  modified_base (23)..(23): um
uagcccggcuugcaggaauacgu

SEQ ID NO: 6240 - RNA, 23 nt, Artificial Sequence
  siRNA antisense strand against b2GPI
  modified_base (1)..(1): 2'-deoxy-2'-fluorocytidine
  modified_base (2)..(2): 2'-O-methyladenosine
  misc_feature (2)..(3): 5'-phosphonothioate
  modified_base (3)..(3): 2'-deoxy-2'-fluorocytidine
  modified_base (4)..(4): 2'-O-methyladenosine
  modified_base (5)..(5): 2'-deoxy-2'-fluorouridine
  modified_base (6)..(6): 2'-O-methyladenosine
  modified_base (7)..(7): 2'-deoxy-2'-fluoroguanosine
  modified_base (8)..(8): cm
  modified_base (9)..(9): 2'-deoxy-2'-fluorocytidine
  modified_base (10)..(10): cm
  modified_base (11)..(11): gm
  modified_base (12)..(12): 2'-deoxy-2'-fluoroguanosine
  modified_base (13)..(13): cm
  modified_base (14)..(14): 2'-deoxy-2'-fluorouridine
  modified_base (15)..(15): um
  modified_base (16)..(16): 2'-deoxy-2'-fluoroguanosine
  modified_base (17)..(17): cm
  modified_base (18)..(18): 2'-deoxy-2'-fluoroadenosine
  modified_base (19)..(19): gm
  modified_base (20)..(20): 2'-deoxy-2'-fluoroguanosine
  modified_base (21)..(21): 2'-O-methyladenosine
  modified_base (22)..(22): 2'-deoxy-2'-fluoroadenosine
  misc_feature (22)..(23): 5'-phosphonothioate
  modified_base (23)..(23): um
cacauagcccggcuugcaggaau

SEQ ID NO: 6241 - RNA, 23 nt, Artificial Sequence
  siRNA antisense strand against b2GPI
  modified_base (1)..(1): 2'-deoxy-2'-fluorouridine
  modified_base (2)..(2): cm
  misc_feature (2)..(3): 5'-phosphonothioate
  modified_base (3)..(3): 2'-deoxy-2'-fluorouridine
  modified_base (4)..(4): cm
  modified_base (5)..(5): 2'-deoxy-2'-fluoroadenosine
  modified_base (6)..(6): um
  modified_base (7)..(7): 2'-deoxy-2'-fluorocytidine
  modified_base (8)..(8): cm
  modified_base (9)..(9): 2'-deoxy-2'-fluorocytidine
  modified_base (10)..(10): um
  modified_base (11)..(11): cm
  modified_base (12)..(12): 2'-deoxy-2'-fluorocytidine
  modified_base (13)..(13): um
  modified_base (14)..(14): 2'-deoxy-2'-fluorocytidine
  modified_base (15)..(15): gm
  modified_base (16)..(16): 2'-deoxy-2'-fluoroguanosine
  modified_base (17)..(17): gm
  modified_base (18)..(18): 2'-deoxy-2'-fluoroadenosine
  modified_base (19)..(19): cm
  modified_base (20)..(20): 2'-deoxy-2'-fluoroadenosine
  modified_base (21)..(21): cm
  modified_base (22)..(22): 2'-deoxy-2'-fluoroadenosine
  misc_feature (22)..(23): 5'-phosphonothioate
  modified_base (23)..(23): um
ucucaucccuccucgggacacau

SEQ ID NO: 6242 - RNA, 23 nt, Artificial Sequence
  siRNA antisense strand against b2GPI
  modified_base (1)..(1): 2'-deoxy-2'-fluorouridine
  modified_base (2)..(2): um
  misc_feature (2)..(3): 5'-phosphonothioate
  modified_base (3)..(3): 2'-deoxy-2'-fluorocytidine
  modified_base (4)..(4): um
  modified_base (5)..(5): 2'-deoxy-2'-fluorocytidine
  modified_base (6)..(6): 2'-O-methyladenosine
  modified_base (7)..(7): 2'-deoxy-2'-fluorouridine
  modified_base (8)..(8): cm
  modified_base (9)..(9): 2'-deoxy-2'-fluorocytidine
  modified_base (10)..(10): cm
  modified_base (11)..(11): um
  modified_base (12)..(12): 2'-deoxy-2'-fluorocytidine
  modified_base (13)..(13): cm
  modified_base (14)..(14): 2'-deoxy-2'-fluorouridine
  modified_base (15)..(15): cm
  modified_base (16)..(16): 2'-deoxy-2'-fluoroguanosine
  modified_base (17)..(17): gm
  modified_base (18)..(18): 2'-deoxy-2'-fluoroguanosine
  modified_base (19)..(19): 2'-O-methyladenosine
  modified_base (20)..(20): 2'-deoxy-2'-fluorocytidine
  modified_base (21)..(21): 2'-O-methyladenosine
  modified_base (22)..(22): 2'-deoxy-2'-fluorocytidine
  misc_feature (22)..(23): 5'-phosphonothioate
  modified_base (23)..(23): 2'-O-methyladenosine
uucucaucccuccucgggacaca

SEQ ID NO: 6243 - RNA, 23 nt, Artificial Sequence
  siRNA antisense strand against b2GPI
  modified_base (1)..(1): 2'-deoxy-2'-fluoroadenosine
  modified_base (2)..(2): cm
  misc_feature (2)..(3): 5'-phosphonothioate
  modified_base (3)..(3): 2'-deoxy-2'-fluorouridine
  modified_base (4)..(4): um
  modified_base (5)..(5): 2'-deoxy-2'-fluorouridine
  modified_base (6)..(6): cm
  modified_base (7)..(7): 2'-deoxy-2'-fluorouridine
  modified_base (8)..(8): cm
  modified_base (9)..(9): 2'-deoxy-2'-fluoroadenosine
  modified_base (10)..(10): um
  modified_base (11)..(11): cm
  modified_base (12)..(12): 2'-deoxy-2'-fluorocytidine
  modified_base (13)..(13): cm
  modified_base (14)..(14): 2'-deoxy-2'-fluorouridine
  modified_base (15)..(15): cm
  modified_base (16)..(16): 2'-deoxy-2'-fluorocytidine
  modified_base (17)..(17): um
  modified_base (18)..(18): 2'-deoxy-2'-fluorocytidine
  modified_base (19)..(19): gm
  modified_base (20)..(20): 2'-deoxy-2'-fluoroguanosine
  modified_base (21)..(21): gm
  modified_base (22)..(22): 2'-deoxy-2'-fluoroadenosine
  misc_feature (22)..(23): 5'-phosphonothioate
  modified_base (23)..(23): cm
acuuucucaucccuccucgggac

SEQ ID NO: 6244 - RNA, 23 nt, Artificial Sequence
  siRNA antisense strand against b2GPI
  modified_base (1)..(1): 2'-deoxy-2'-fluoroadenosine
  modified_base (2)..(2): 2'-O-methyladenosine
  misc_feature (2)..(3): 5'-phosphonothioate
  modified_base (3)..(3): 2'-deoxy-2'-fluorocytidine
  modified_base (4)..(4): um
  modified_base (5)..(5): 2'-deoxy-2'-fluorouridine
  modified_base (6)..(6): um
  modified_base (7)..(7): 2'-deoxy-2'-fluorocytidine
  modified_base (8)..(8): um
  modified_base (9)..(9): 2'-deoxy-2'-fluorocytidine
  modified_base (10)..(10): 2'-O-methyladenosine
  modified_base (11)..(11): um
  modified_base (12)..(12): 2'-deoxy-2'-fluorocytidine
  modified_base (13)..(13): cm
  modified_base (14)..(14): 2'-deoxy-2'-fluorocytidine
  modified_base (15)..(15): um
  modified_base (16)..(16): 2'-deoxy-2'-fluorocytidine
  modified_base (17)..(17): cm
  modified_base (18)..(18): 2'-deoxy-2'-fluorouridine
  modified_base (19)..(19): cm
  modified_base (20)..(20): 2'-deoxy-2'-fluoroguanosine
  modified_base (21)..(21): gm
  modified_base (22)..(22): 2'-deoxy-2'-fluoroguanosine
  misc_feature (22)..(23): 5'-phosphonothioate
  modified_base (23)..(23): 2'-O-methyladenosine
aacuuucucaucccuccucggga

SEQ ID NO: 6245 - RNA, 23 nt, Artificial Sequence
  siRNA antisense strand against b2GPI
  modified_base (1)..(1): 2'-deoxy-2'-fluoroadenosine
  modified_base (2)..(2): 2'-O-methyladenosine
  misc_feature (2)..(3): 5'-phosphonothioate
  modified_base (3)..(3): 2'-deoxy-2'-fluoroadenosine
  modified_base (4)..(4): cm
  modified_base (5)..(5): 2'-deoxy-2'-fluorouridine
  modified_base (6)..(6): um
  modified_base (7)..(7): 2'-deoxy-2'-fluorouridine
  modified_base (8)..(8): cm
  modified_base (9)..(9): 2'-deoxy-2'-fluorouridine
  modified_base (10)..(10): cm
  modified_base (11)..(11): 2'-O-methyladenosine
  modified_base (12)..(12): 2'-deoxy-2'-fluorouridine
  modified_base (13)..(13): cm
  modified_base (14)..(14): 2'-deoxy-2'-fluorocytidine
  modified_base (15)..(15): cm
  modified_base (16)..(16): 2'-deoxy-2'-fluorouridine
  modified_base (17)..(17): cm
  modified_base (18)..(18): 2'-deoxy-2'-fluorocytidine
  modified_base (19)..(19): um
  modified_base (20)..(20): 2'-deoxy-2'-fluorocytidine
  modified_base (21)..(21): gm
  modified_base (22)..(22): 2'-deoxy-2'-fluoroguanosine
  misc_feature (22)..(23): 5'-phosphonothioate
  modified_base (23)..(23): gm
aaacuuucucaucccuccucggg

SEQ ID NO: 6246 - RNA, 23 nt, Artificial Sequence
  siRNA antisense strand against b2GPI
  modified_base (1)..(1): 2'-deoxy-2'-fluorouridine
  modified_base (2)..(2): 2'-O-methyladenosine
  misc_feature (2)..(3): 5'-phosphonothioate
  modified_base (3)..(3): 2'-deoxy-2'-fluoroadenosine
  modified_base (4)..(4): 2'-O-methyladenosine
  modified_base (5)..(5): 2'-deoxy-2'-fluorocytidine
  modified_base (6)..(6): um
  modified_base (7)..(7): 2'-deoxy-2'-fluorouridine
  modified_base (8)..(8): um
  modified_base (9)..(9): 2'-deoxy-2'-fluorocytidine
  modified_base (10)..(10): um
  modified_base (11)..(11): cm
  modified_base (12)..(12): 2'-deoxy-2'-fluoroadenosine
  modified_base (13)..(13): um
  modified_base (14)..(14): 2'-deoxy-2'-fluorocytidine
  modified_base (15)..(15): cm
  modified_base (16)..(16): 2'-deoxy-2'-fluorocytidine
  modified_base (17)..(17): um
  modified_base (18)..(18): 2'-deoxy-2'-fluorocytidine
  modified_base (19)..(19): cm
  modified_base (20)..(20): 2'-deoxy-2'-fluorouridine
  modified_base (21)..(21): cm
  modified_base (22)..(22): 2'-deoxy-2'-fluoroguanosine
  misc_feature (22)..(23): 5'-phosphonothioate
  modified_base (23)..(23): gm
uaaacuuucucaucccuccucgg

SEQ ID NO: 6247 - RNA, 23 nt, Artificial Sequence
  siRNA antisense strand against b2GPI
  modified_base (1)..(1): 2'-deoxy-2'-fluoroadenosine
  modified_base (2)..(2): um
  misc_feature (2)..(3): 5'-phosphonothioate
  modified_base (3)..(3): 2'-deoxy-2'-fluoroadenosine
  modified_base (4)..(4): 2'-O-methyladenosine
  modified_base (5)..(5): 2'-deoxy-2'-fluoroadenosine
  modified_base (6)..(6): cm
  modified_base (7)..(7): 2'-deoxy-2'-fluorouridine
  modified_base (8)..(8): um
  modified_base (9)..(9): 2'-deoxy-2'-fluorouridine
  modified_base (10)..(10): cm
  modified_base (11)..(11): um
  modified_base (12)..(12): 2'-deoxy-2'-fluorocytidine
  modified_base (13)..(13): 2'-O-methyladenosine
  modified_base (14)..(14): 2'-deoxy-2'-fluorouridine
  modified_base (15)..(15): cm
  modified_base (16)..(16): 2'-deoxy-2'-fluorocytidine
  modified_base (17)..(17): cm
  modified_base (18)..(18): 2'-deoxy-2'-fluorouridine
  modified_base (19)..(19): cm
  modified_base (20)..(20): 2'-deoxy-2'-fluorocytidine
  modified_base (21)..(21): um
  modified_base (22)..(22): 2'-deoxy-2'-fluorocytidine
  misc_feature (22)..(23): 5'-phosphonothioate
  modified_base (23)..(23): gm
auaaacuuucucaucccuccucg

SEQ ID NO: 6248 - RNA, 23 nt, Artificial Sequence
  siRNA antisense strand against b2GPI
  modified_base (1)..(1): 2'-deoxy-2'-fluoroguanosine
  modified_base (2)..(2): 2'-O-methyladenosine
  misc_feature (2)..(3): 5'-phosphonothioate
  modified_base (3)..(3): 2'-deoxy-2'-fluorouridine
  modified_base (4)..(4): 2'-O-methyladenosine
  modified_base (5)..(5): 2'-deoxy-2'-fluoroadenosine
  modified_base (6)..(6): 2'-O-methyladenosine
  modified_base (7)..(7): 2'-deoxy-2'-fluorocytidine
  modified_base (8)..(8): um
  modified_base (9)..(9): 2'-deoxy-2'-fluorouridine
  modified_base (10)..(10): um
  modified_base (11)..(11): cm
  modified_base (12)..(12): 2'-deoxy-2'-fluorouridine
  modified_base (13)..(13): cm
  modified_base (14)..(14): 2'-deoxy-2'-fluoroadenosine
  modified_base (15)..(15): um
  modified_base (16)..(16): 2'-deoxy-2'-fluorocytidine
  modified_base (17)..(17): cm
  modified_base (18)..(18): 2'-deoxy-2'-fluorocytidine
  modified_base (19)..(19): um
  modified_base (20)..(20): 2'-deoxy-2'-fluorocytidine
  modified_base (21)..(21): cm
  modified_base (22)..(22): 2'-deoxy-2'-fluorouridine
  misc_feature (22)..(23): 5'-phosphonothioate
  modified_base (23)..(23): cm
gauaaacuuucucaucccuccuc

SEQ ID NO: 6249 - RNA, 23 nt, Artificial Sequence
  siRNA antisense strand against b2GPI
  modified_base (1)..(1): 2'-deoxy-2'-fluoroadenosine
  modified_base (2)..(2): gm
  misc_feature (2)..(3): 5'-phosphonothioate
  modified_base (3)..(3): 2'-deoxy-2'-fluoroadenosine
  modified_base (4)..(4): um
  modified_base (5)..(5): 2'-deoxy-2'-fluoroadenosine
  modified_base (6)..(6): 2'-O-methyladenosine
  modified_base (7)..(7): 2'-deoxy-2'-fluoroadenosine
  modified_base (8)..(8): cm
  modified_base (9)..(9): 2'-deoxy-2'-fluorouridine
  modified_base (10)..(10): um
  modified_base (11)..(11): um
  modified_base (12)..(12): 2'-deoxy-2'-fluorocytidine
  modified_base (13)..(13): um
  modified_base (14)..(14): 2'-deoxy-2'-fluorocytidine
  modified_base (15)..(15): 2'-O-methyladenosine
  modified_base (16)..(16): 2'-deoxy-2'-fluorouridine
  modified_base (17)..(17): cm
  modified_base (18)..(18): 2'-deoxy-2'-fluorocytidine
  modified_base (19)..(19): cm
  modified_base (20)..(20): 2'-deoxy-2'-fluorouridine
  modified_base (21)..(21): cm
  modified_base (22)..(22): 2'-deoxy-2'-fluorocytidine
  misc_feature (22)..(23): 5'-phosphonothioate
  modified_base (23)..(23): um
agauaaacuuucucaucccuccu

SEQ ID NO: 6250 - RNA, 23 nt, Artificial Sequence
  siRNA antisense strand against b2GPI
  modified_base (1)..(1): 2'-deoxy-2'-fluorocytidine
  modified_base (2)..(2): 2'-O-methyladenosine
  misc_feature (2)..(3): 5'-phosphonothioate
  modified_base (3)..(3): 2'-deoxy-2'-fluoroguanosine
  modified_base (4)..(4): 2'-O-methyladenosine
  modified_base (5)..(5): 2'-deoxy-2'-fluorouridine
  modified_base (6)..(6): 2'-O-methyladenosine
  modified_base (7)..(7): 2'-deoxy-2'-fluoroadenosine
  modified_base (8)..(8): 2'-O-methyladenosine
  modified_base (9)..(9): 2'-deoxy-2'-fluorocytidine
  modified_base (10)..(10): um
  modified_base (11)..(11): um
  modified_base (12)..(12): 2'-deoxy-2'-fluorouridine
  modified_base (13)..(13): cm
  modified_base (14)..(14): 2'-deoxy-2'-fluorouridine
  modified_base (15)..(15): cm
  modified_base (16)..(16): 2'-deoxy-2'-fluoroadenosine
  modified_base (17)..(17): um
  modified_base (18)..(18): 2'-deoxy-2'-fluorocytidine
  modified_base (19)..(19): cm
  modified_base (20)..(20): 2'-deoxy-2'-fluorocytidine
  modified_base (21)..(21): um
  modified_base (22)..(22): 2'-deoxy-2'-fluorocytidine
  misc_feature (22)..(23): 5'-phosphonothioate
  modified_base (23)..(23): cm
cagauaaacuuucucaucccucc

SEQ ID NO: 6251 - RNA, 23 nt, Artificial Sequence
  siRNA antisense strand against b2GPI
  modified_base (1)..(1): 2'-deoxy-2'-fluoroadenosine
  modified_base (2)..(2): gm
  misc_feature (2)..(3): 5'-phosphonothioate
  modified_base (3)..(3): 2'-deoxy-2'-fluoroadenosine
  modified_base (4)..(4): gm
  modified_base (5)..(5): 2'-deoxy-2'-fluoroguanosine
  modified_base (6)..(6): gm
  modified_base (7)..(7): 2'-deoxy-2'-fluorocytidine
  modified_base (8)..(8): 2'-O-methyladenosine
  modified_base (9)..(9): 2'-deoxy-2'-fluoroguanosine
  modified_base (10)..(10): 2'-O-methyladenosine
  modified_base (11)..(11): um
  modified_base (12)..(12): 2'-deoxy-2'-fluoroadenosine
  modified_base (13)..(13): 2'-O-methyladenosine
  modified_base (14)..(14): 2'-deoxy-2'-fluoroadenosine
  modified_base (15)..(15): cm
  modified_base (16)..(16): 2'-deoxy-2'-fluorouridine
  modified_base (17)..(17): um
  modified_base (18)..(18): 2'-deoxy-2'-fluorouridine
  modified_base (19)..(19): cm
  modified_base (20)..(20): 2'-deoxy-2'-fluorouridine
  modified_base (21)..(21): cm
  modified_base (22)..(22): 2'-deoxy-2'-fluoroadenosine
  misc_feature (22)..(23): 5'-phosphonothioate
  modified_base (23)..(23): um
agagggcagauaaacuuucucau

SEQ ID NO: 6252 - RNA, 23 nt, Artificial Sequence
  siRNA antisense strand against b2GPI
  modified_base (1)..(1): 2'-deoxy-2'-fluorouridine
  modified_base (2)..(2): gm
  misc_feature (2)..(3): 5'-phosphonothioate
  modified_base (3)..(3): 2'-deoxy-2'-fluoroadenosine
  modified_base (4)..(4): gm
  modified_base (5)..(5): 2'-deoxy-2'-fluoroadenosine
  modified_base (6)..(6): gm
  modified_base (7)..(7): 2'-deoxy-2'-fluoroguanosine
  modified_base (8)..(8): gm
  modified_base (9)..(9): 2'-deoxy-2'-fluorocytidine
  modified_base (10)..(10): 2'-O-methyladenosine
  modified_base (11)..(11): gm
  modified_base (12)..(12): 2'-deoxy-2'-fluoroadenosine
  modified_base (13)..(13): um
  modified_base (14)..(14): 2'-deoxy-2'-fluoroadenosine
  modified_base (15)..(15): 2'-O-methyladenosine
  modified_base (16)..(16): 2'-deoxy-2'-fluoroadenosine
  modified_base (17)..(17): cm
  modified_base (18)..(18): 2'-deoxy-2'-fluorouridine
  modified_base (19)..(19): um
  modified_base (20)..(20): 2'-deoxy-2'-fluorouridine
  modified_base (21)..(21): cm
  modified_base (22)..(22): 2'-deoxy-2'-fluorouridine
  misc_feature (22)..(23): 5'-phosphonothioate
  modified_base (23)..(23): cm
ugagagggcagauaaacuuucuc

SEQ ID NO: 6253 - RNA, 23 nt, Artificial Sequence
  siRNA antisense strand against b2GPI
  modified_base (1)..(1): 2'-deoxy-2'-fluorocytidine
  modified_base (2)..(2): cm
  misc_feature (2)..(3): 5'-phosphonothioate
  modified_base (3)..(3): 2'-deoxy-2'-fluoroadenosine
  modified_base (4)..(4): cm
  modified_base (5)..(5): 2'-deoxy-2'-fluoroadenosine
  modified_base (6)..(6): gm
  modified_base (7)..(7): 2'-deoxy-2'-fluorouridine
  modified_base (8)..(8): cm
  modified_base (9)..(9): 2'-deoxy-2'-fluorocytidine
  modified_base (10)..(10): um
  modified_base (11)..(11): gm
  modified_base (12)..(12): 2'-deoxy-2'-fluorouridine
  modified_base (13)..(13): gm
  modified_base (14)..(14): 2'-deoxy-2'-fluoroadenosine
  modified_base (15)..(15): gm
  modified_base (16)..(16): 2'-deoxy-2'-fluoroadenosine
  modified_base (17)..(17): gm
  modified_base (18)..(18): 2'-deoxy-2'-fluoroguanosine
  modified_base (19)..(19): gm
  modified_base (20)..(20): 2'-deoxy-2'-fluorocytidine
  modified_base (21)..(21): 2'-O-methyladenosine
  modified_base (22)..(22): 2'-deoxy-2'-fluoroguanosine
  misc_feature (22)..(23): 5'-phosphonothioate
  modified_base (23)..(23): 2'-O-methyladenosine
ccacaguccugugagagggcaga

SEQ ID NO: 6254 - RNA, 23 nt, Artificial Sequence
  siRNA antisense strand against b2GPI
  modified_base (1)..(1): 2'-deoxy-2'-fluoroadenosine
  modified_base (2)..(2): um
  misc_feature (2)..(3): 5'-phosphonothioate
  modified_base (3)..(3): 2'-deoxy-2'-fluoroguanosine
  modified_base (4)..(4): gm
  modified_base (5)..(5): 2'-deoxy-2'-fluoroguanosine
  modified_base (6)..(6): cm
  modified_base (7)..(7): 2'-deoxy-2'-fluorocytidine
  modified_base (8)..(8): 2'-O-methyladenosine
  modified_base (9)..(9): 2'-deoxy-2'-fluorocytidine
  modified_base (10)..(10): 2'-O-methyladenosine
  modified_base (11)..(11): gm
  modified_base (12)..(12): 2'-deoxy-2'-fluorouridine
  modified_base (13)..(13): cm
  modified_base (14)..(14): 2'-deoxy-2'-fluorocytidine
  modified_base (15)..(15): um
  modified_base (16)..(16): 2'-deoxy-2'-fluoroguanosine
  modified_base (17)..(17): um
  modified_base (18)..(18): 2'-deoxy-2'-fluoroguanosine
  modified_base (19)..(19): 2'-O-methyladenosine
  modified_base (20)..(20): 2'-deoxy-2'-fluoroguanosine
  modified_base (21)..(21): 2'-O-methyladenosine
  modified_base (22)..(22): 2'-deoxy-2'-fluoroguanosine
  misc_feature (22)..(23): 5'-phosphonothioate
  modified_base (23)..(23): gm
augggccacaguccugugagagg

SEQ ID NO: 6255 - RNA, 23 nt, Artificial Sequence
  siRNA antisense strand against b2GPI
  modified_base (1)..(1): 2'-deoxy-2'-fluorouridine
  modified_base (2)..(2): gm
  misc_feature (2)..(3): 5'-phosphonothioate
  modified_base (3)..(3): 2'-deoxy-2'-fluoroadenosine
  modified_base (4)..(4): um
  modified_base (5)..(5): 2'-deoxy-2'-fluoroguanosine
  modified_base (6)..(6): gm
  modified_base (7)..(7): 2'-deoxy-2'-fluoroguanosine
  modified_base (8)..(8): cm
  modified_base (9)..(9): 2'-deoxy-2'-fluorocytidine
  modified_base (10)..(10): 2'-O-methyladenosine
  modified_base (11)..(11): cm
  modified_base (12)..(12): 2'-deoxy-2'-fluoroadenosine
  modified_base (13)..(13): gm
  modified_base (14)..(14): 2'-deoxy-2'-fluorouridine
  modified_base (15)..(15): cm
  modified_base (16)..(16): 2'-deoxy-2'-fluorocytidine
  modified_base (17)..(17): um
  modified_base (18)..(18): 2'-deoxy-2'-fluoroguanosine
  modified_base (19)..(19): um
  modified_base (20)..(20): 2'-deoxy-2'-fluoroguanosine
  modified_base (21)..(21): 2'-O-methyladenosine
  modified_base (22)..(22): 2'-deoxy-2'-fluoroguanosine
  misc_feature (22)..(23): 5'-phosphonothioate
  modified_base (23)..(23): 2'-O-methyladenosine
ugaugggccacaguccugugaga

SEQ ID NO: 6256 - RNA, 23 nt, Artificial Sequence
  siRNA antisense strand against b2GPI
  modified_base (1)..(1): 2'-deoxy-2'-fluorouridine
  modified_base (2)..(2): gm
  misc_feature (2)..(3): 5'-phosphonothioate
  modified_base (3)..(3): 2'-deoxy-2'-fluorouridine
  modified_base (4)..(4): um
  modified_base (5)..(5): 2'-deoxy-2'-fluoroguanosine
  modified_base (6)..(6): 2'-O-methyladenosine
  modified_base (7)..(7): 2'-deoxy-2'-fluorouridine
  modified_base (8)..(8): gm
  modified_base (9)..(9): 2'-deoxy-2'-fluoroguanosine
  modified_base (10)..(10): gm
  modified_base (11)..(11): cm
  modified_base (12)..(12): 2'-deoxy-2'-fluorocytidine
  modified_base (13)..(13): 2'-O-methyladenosine
  modified_base (14)..(14): 2'-deoxy-2'-fluorocytidine
  modified_base (15)..(15): 2'-O-methyladenosine
  modified_base (16)..(16): 2'-deoxy-2'-fluoroguanosine
  modified_base (17)..(17): um
  modified_base (18)..(18): 2'-deoxy-2'-fluorocytidine
  modified_base (19)..(19): cm
  modified_base (20)..(20): 2'-deoxy-2'-fluorouridine
  modified_base (21)..(21): gm
  modified_base (22)..(22): 2'-deoxy-2'-fluorouridine
  misc_feature (22)..(23): 5'-phosphonothioate
  modified_base (23)..(23): gm
uguugaugggccacaguccugug

SEQ ID NO: 6257 - RNA, 23 nt, Artificial Sequence
  siRNA antisense strand against b2GPI
  modified_base (1)..(1): 2'-deoxy-2'-fluoroguanosine
  modified_base (2)..(2): um
  misc_feature (2)..(3): 5'-phosphonothioate
  modified_base (3)..(3): 2'-deoxy-2'-fluoroguanosine
  modified_base (4)..(4): um
  modified_base (5)..(5): 2'-deoxy-2'-fluorouridine
  modified_base (6)..(6): gm
  modified_base (7)..(7): 2'-deoxy-2'-fluoroadenosine
  modified_base (8)..(8): um
  modified_base (9)..(9): 2'-deoxy-2'-fluoroguanosine
  modified_base (10)..(10): gm
  modified_base (11)..(11): gm
  modified_base (12)..(12): 2'-deoxy-2'-fluorocytidine
  modified_base (13)..(13): cm
  modified_base (14)..(14): 2'-deoxy-2'-fluoroadenosine
  modified_base (15)..(15): cm
  modified_base (16)..(16): 2'-deoxy-2'-fluoroadenosine
  modified_base (17)..(17): gm
  modified_base (18)..(18): 2'-deoxy-2'-fluorouridine
  modified_base (19)..(19): cm
  modified_base (20)..(20): 2'-deoxy-2'-fluorocytidine
  modified_base (21)..(21): um
  modified_base (22)..(22): 2'-deoxy-2'-fluoroguanosine
  misc_feature (22)..(23): 5'-phosphonothioate
  modified_base (23)..(23): um
guguugaugggccacaguccugu

SEQ ID NO: 6258 - RNA, 23 nt, Artificial Sequence
  siRNA antisense strand against b2GPI
  modified_base (1)..(1): 2'-deoxy-2'-fluorouridine
  modified_base (2)..(2): um
  misc_feature (2)..(3): 5'-phosphonothioate
  modified_base (3)..(3): 2'-deoxy-2'-fluorocytidine
  modified_base (4)..(4): 2'-O-methyladenosine
  modified_base (5)..(5): 2'-deoxy-2'-fluoroguanosine
  modified_base (6)..(6): 2'-O-methyladenosine
  modified_base (7)..(7): 2'-deoxy-2'-fluoroguanosine
  modified_base (8)..(8): um
  modified_base (9)..(9): 2'-deoxy-2'-fluoroguanosine
  modified_base (10)..(10): um
  modified_base (11)..(11): um
  modified_base (12)..(12): 2'-deoxy-2'-fluoroguanosine
  modified_base (13)..(13): 2'-O-methyladenosine
  modified_base (14)..(14): 2'-deoxy-2'-fluorouridine
  modified_base (15)..(15): gm
  modified_base (16)..(16): 2'-deoxy-2'-fluoroguanosine
  modified_base (17)..(17): gm
  modified_base (18)..(18): 2'-deoxy-2'-fluorocytidine
  modified_base (19)..(19): cm
  modified_base (20)..(20): 2'-deoxy-2'-fluoroadenosine
  modified_base (21)..(21): cm
  modified_base (22)..(22): 2'-deoxy-2'-fluoroadenosine
  misc_feature (22)..(23): 5'-phosphonothioate
  modified_base (23)..(23): gm
uucagaguguugaugggccacag

SEQ ID NO: 6259 - RNA, 23 nt, Artificial Sequence
  siRNA antisense strand against b2GPI
  modified_base (1)..(1): 2'-deoxy-2'-fluoroadenosine
  modified_base (2)..(2): um
  misc_feature (2)..(3): 5'-phosphonothioate
  modified_base (3)..(3): 2'-deoxy-2'-fluorouridine
  modified_base (4)..(4): um
  modified_base (5)..(5): 2'-deoxy-2'-fluorocytidine
  modified_base (6)..(6): 2'-O-methyladenosine
  modified_base (7)..(7): 2'-deoxy-2'-fluoroguanosine
  modified_base (8)..(8): 2'-O-methyladenosine
  modified_base (9)..(9): 2'-deoxy-2'-fluoroguanosine
  modified_base (10)..(10): um
  modified_base (11)..(11): gm
  modified_base (12)..(12): 2'-deoxy-2'-fluorouridine
  modified_base (13)..(13): um
  modified_base (14)..(14): 2'-deoxy-2'-fluoroguanosine
  modified_base (15)..(15): 2'-O-methyladenosine
  modified_base (16)..(16): 2'-deoxy-2'-fluorouridine
  modified_base (17)..(17): gm
  modified_base (18)..(18): 2'-deoxy-2'-fluoroguanosine
  modified_base (19)..(19): gm
  modified_base (20)..(20): 2'-deoxy-2'-fluorocytidine
  modified_base (21)..(21): cm
  modified_base (22)..(22): 2'-deoxy-2'-fluoroadenosine
  misc_feature (22)..(23): 5'-phosphonothioate
  modified_base (23)..(23): cm
auuucagaguguugaugggccac

SEQ ID NO: 6260 - RNA, 23 nt, Artificial Sequence
  siRNA antisense strand against b2GPI
  modified_base (1)..(1): 2'-deoxy-2'-fluorocytidine
  modified_base (2)..(2): 2'-O-methyladenosine
  misc_feature (2)..(3): 5'-phosphonothioate
  modified_base (3)..(3): 2'-deoxy-2'-fluorouridine
  modified_base (4)..(4): um
  modified_base (5)..(5): 2'-deoxy-2'-fluorouridine
  modified_base (6)..(6): cm
  modified_base (7)..(7): 2'-deoxy-2'-fluoroadenosine
  modified_base (8)..(8): gm
  modified_base (9)..(9): 2'-deoxy-2'-fluoroadenosine
  modified_base (10)..(10): gm
  modified_base (11)..(11): um
  modified_base (12)..(12): 2'-deoxy-2'-fluoroguanosine
  modified_base (13)..(13): um
  modified_base (14)..(14): 2'-deoxy-2'-fluorouridine
  modified_base (15)..(15): gm
  modified_base (16)..(16): 2'-deoxy-2'-fluoroadenosine
  modified_base (17)..(17): um
  modified_base (18)..(18): 2'-deoxy-2'-fluoroguanosine
  modified_base (19)..(19): gm
  modified_base (20)..(20): 2'-deoxy-2'-fluoroguanosine
  modified_base (21)..(21): cm
  modified_base (22)..(22): 2'-deoxy-2'-fluorocytidine
  misc_feature (22)..(23): 5'-phosphonothioate
  modified_base (23)..(23): 2'-O-methyladenosine
cauuucagaguguugaugggcca

SEQ ID NO: 6261 - RNA, 23 nt, Artificial Sequence
  siRNA antisense strand against b2GPI
  modified_base (1)..(1): 2'-deoxy-2'-fluoroadenosine
  modified_base (2)..(2): cm
  misc_feature (2)..(3): 5'-phosphonothioate
  modified_base (3)..(3): 2'-deoxy-2'-fluoroadenosine
  modified_base (4)..(4): um
  modified_base (5)..(5): 2'-deoxy-2'-fluorouridine
  modified_base (6)..(6): um
  modified_base (7)..(7): 2'-deoxy-2'-fluorocytidine
  modified_base (8)..(8): 2'-O-methyladenosine
  modified_base (9)..(9): 2'-deoxy-2'-fluoroguanosine
  modified_base (10)..(10): 2'-O-methyladenosine
  modified_base (11)..(11): gm
  modified_base (12)..(12): 2'-deoxy-2'-fluorouridine
  modified_base (13)..(13): gm
  modified_base (14)..(14): 2'-deoxy-2'-fluorouridine
  modified_base (15)..(15): um
  modified_base (16)..(16): 2'-deoxy-2'-fluoroguanosine
  modified_base (17)..(17): 2'-O-methyladenosine
  modified_base (18)..(18): 2'-deoxy-2'-fluorouridine
  modified_base (19)..(19): gm
  modified_base (20)..(20): 2'-deoxy-2'-fluoroguanosine
  modified_base (21)..(21): gm
  modified_base (22)..(22): 2'-deoxy-2'-fluorocytidine
  misc_feature (22)..(23): 5'-phosphonothioate
  modified_base (23)..(23): cm
acauuucagaguguugaugggcc

SEQ ID NO: 6262 - RNA, 23 nt, Artificial Sequence
  siRNA antisense strand against b2GPI
  modified_base (1)..(1): 2'-deoxy-2'-fluorouridine
  modified_base (2)..(2): 2'-O-methyladenosine
  misc_feature (2)..(3): 5'-phosphonothioate
  modified_base (3)..(3): 2'-deoxy-2'-fluorocytidine
  modified_base (4)..(4): 2'-O-methyladenosine
  modified_base (5)..(5): 2'-deoxy-2'-fluorouridine
  modified_base (6)..(6): um
  modified_base (7)..(7): 2'-deoxy-2'-fluorouridine
  modified_base (8)..(8): cm
  modified_base (9)..(9): 2'-deoxy-2'-fluoroadenosine
  modified_base (10)..(10): gm
  modified_base (11)..(11): 2'-O-methyladenosine
  modified_base (12)..(12): 2'-deoxy-2'-fluoroguanosine
  modified_base (13)..(13): um
  modified_base (14)..(14): 2'-deoxy-2'-fluoroguanosine
  modified_base (15)..(15): um
  modified_base (16)..(16): 2'-deoxy-2'-fluorouridine
  modified_base (17)..(17): gm
  modified_base (18)..(18): 2'-deoxy-2'-fluoroadenosine
  modified_base (19)..(19): um
  modified_base (20)..(20): 2'-deoxy-2'-fluoroguanosine
  modified_base (21)..(21): gm
  modified_base (22)..(22): 2'-deoxy-2'-fluoroguanosine
  misc_feature (22)..(23): 5'-phosphonothioate
  modified_base (23)..(23): cm
uacauuucagaguguugaugggc

SEQ ID NO: 6263 - RNA, 23 nt, Artificial Sequence
  siRNA antisense strand against b2GPI
  modified_base (1)..(1): 2'-deoxy-2'-fluorouridine
  modified_base (2)..(2): gm
  misc_feature (2)..(3): 5'-phosphonothioate
  modified_base (3)..(3): 2'-deoxy-2'-fluorouridine
  modified_base (4)..(4): 2'-O-methyladenosine
  modified_base (5)..(5): 2'-deoxy-2'-fluorocytidine
  modified_base (6)..(6): 2'-O-methyladenosine
  modified_base (7)..(7): 2'-deoxy-2'-fluorouridine
  modified_base (8)..(8): um
  modified_base (9)..(9): 2'-deoxy-2'-fluorouridine
  modified_base (10)..(10): cm
  modified_base (11)..(11): 2'-O-methyladenosine
  modified_base (12)..(12): 2'-deoxy-2'-fluoroguanosine
  modified_base (13)..(13): 2'-O-methyladenosine
  modified_base (14)..(14): 2'-deoxy-2'-fluoroguanosine
  modified_base (15)..(15): um
  modified_base (16)..(16): 2'-deoxy-2'-fluoroguanosine
  modified_base (17)..(17): um
  modified_base (18)..(18): 2'-deoxy-2'-fluorouridine
  modified_base (19)..(19): gm
  modified_base (20)..(20): 2'-deoxy-2'-fluoroadenosine
  modified_base (21)..(21): um
  modified_base (22)..(22): 2'-deoxy-2'-fluoroguanosine
  misc_feature (22)..(23): 5'-phosphonothioate
  modified_base (23)..(23): gm
uguacauuucagaguguugaugg

SEQ ID NO: 6264 - RNA, 23 nt, Artificial Sequence
  siRNA antisense strand against b2GPI
  modified_base (1)..(1): 2'-deoxy-2'-fluorouridine
  modified_base (2)..(2): gm
  misc_feature (2)..(3): 5'-phosphonothioate
  modified_base (3)..(3): 2'-deoxy-2'-fluoroguanosine
  modified_base (4)..(4): gm
  modified_base (5)..(5): 2'-deoxy-2'-fluorouridine
  modified_base (6)..(6): gm
  modified_base (7)..(7): 2'-deoxy-2'-fluorouridine
  modified_base (8)..(8): 2'-O-methyladenosine
  modified_base (9)..(9): 2'-deoxy-2'-fluorocytidine
  modified_base (10)..(10): 2'-O-methyladenosine
  modified_base (11)..(11): um
  modified_base (12)..(12): 2'-deoxy-2'-fluorouridine
  modified_base (13)..(13): um
  modified_base (14)..(14): 2'-deoxy-2'-fluorocytidine
  modified_base (15)..(15): 2'-O-methyladenosine
  modified_base (16)..(16): 2'-deoxy-2'-fluoroguanosine
  modified_base (17)..(17): 2'-O-methyladenosine
  modified_base (18)..(18): 2'-deoxy-2'-fluoroguanosine
  modified_base (19)..(19): um
  modified_base (20)..(20): 2'-deoxy-2'-fluoroguanosine
  modified_base (21)..(21): um
  modified_base (22)..(22): 2'-deoxy-2'-fluorouridine
  misc_feature (22)..(23): 5'-phosphonothioate
  modified_base (23)..(23): gm
uggguguacauuucagaguguug

SEQ ID NO: 6265 - RNA, 23 nt, Artificial Sequence
  siRNA antisense strand against b2GPI
  modified_base (1)..(1): 2'-deoxy-2'-fluorouridine
  modified_base (2)..(2): cm
  misc_feature (2)..(3): 5'-phosphonothioate
  modified_base (3)..(3): 2'-deoxy-2'-fluorouridine
  modified_base (4)..(4): gm
  modified_base (5)..(5): 2'-deoxy-2'-fluoroguanosine
  modified_base (6)..(6): gm
  modified_base (7)..(7): 2'-deoxy-2'-fluorouridine
  modified_base (8)..(8): gm
  modified_base (9)..(9): 2'-deoxy-2'-fluorouridine
  modified_base (10)..(10): 2'-O-methyladenosine
  modified_base (11)..(11): cm
  modified_base (12)..(12): 2'-deoxy-2'-fluoroadenosine
  modified_base (13)..(13): um
  modified_base (14)..(14): 2'-deoxy-2'-fluorouridine
  modified_base (15)..(15): um
  modified_base (16)..(16): 2'-deoxy-2'-fluorocytidine
  modified_base (17)..(17): 2'-O-methyladenosine
  modified_base (18)..(18): 2'-deoxy-2'-fluoroguanosine
  modified_base (19)..(19): 2'-O-methyladenosine
  modified_base (20)..(20): 2'-deoxy-2'-fluoroguanosine
  modified_base (21)..(21): um
  modified_base (22)..(22): 2'-deoxy-2'-fluoroguanosine
  misc_feature (22)..(23): 5'-phosphonothioate
  modified_base (23)..(23): um
ucuggguguacauuucagagugu

SEQ ID NO: 6266 - RNA, 23 nt, Artificial Sequence
  siRNA antisense strand against b2GPI
  modified_base (1)..(1): 2'-deoxy-2'-fluorouridine
  modified_base (2)..(2): 2'-O-methyladenosine
  misc_feature (2)..(3): 5'-phosphonothioate
  modified_base (3)..(3): 2'-deoxy-2'-fluorocytidine
  modified_base (4)..(4): um
  modified_base (5)..(5): 2'-deoxy-2'-fluorocytidine
  modified_base (6)..(6): um
  modified_base (7)..(7): 2'-deoxy-2'-fluoroguanosine
  modified_base (8)..(8): gm
  modified_base (9)..(9): 2'-deoxy-2'-fluoroguanosine
  modified_base (10)..(10): um
  modified_base (11)..(11): gm
  modified_base (12)..(12): 2'-deoxy-2'-fluorouridine
  modified_base (13)..(13): 2'-O-methyladenosine
  modified_base (14)..(14): 2'-deoxy-2'-fluorocytidine
  modified_base (15)..(15): 2'-O-methyladenosine
  modified_base (16)..(16): 2'-deoxy-2'-fluorouridine
  modified_base (17)..(17): um
  modified_base (18)..(18): 2'-deoxy-2'-fluorouridine
  modified_base (19)..(19): cm
  modified_base (20)..(20): 2'-deoxy-2'-fluoroadenosine
  modified_base (21)..(21): gm
  modified_base (22)..(22): 2'-deoxy-2'-fluoroadenosine
  misc_feature (22)..(23): 5'-phosphonothioate
  modified_base (23)..(23): gm
uacucuggguguacauuucagag

SEQ ID NO: 6267 - RNA, 23 nt, Artificial Sequence
  siRNA antisense strand against b2GPI
  modified_base (1)..(1): 2'-deoxy-2'-fluoroadenosine
  modified_base (2)..(2): um
  misc_feature (2)..(3): 5'-phosphonothioate
  modified_base (3)..(3): 2'-deoxy-2'-fluoroadenosine
  modified_base (4)..(4): cm
  modified_base (5)..(5): 2'-deoxy-2'-fluorouridine
  modified_base (6)..(6): cm
  modified_base (7)..(7): 2'-deoxy-2'-fluorouridine
  modified_base (8)..(8): gm
  modified_base (9)..(9): 2'-deoxy-2'-fluoroguanosine
  modified_base (10)..(10): gm
  modified_base (11)..(11): um
  modified_base (12)..(12): 2'-deoxy-2'-fluoroguanosine
  modified_base (13)..(13): um
  modified_base (14)..(14): 2'-deoxy-2'-fluoroadenosine
  modified_base (15)..(15): cm
  modified_base (16)..(16): 2'-deoxy-2'-fluoroadenosine
  modified_base (17)..(17): um
  modified_base (18)..(18): 2'-deoxy-2'-fluorouridine
  modified_base (19)..(19): um
  modified_base (20)..(20): 2'-deoxy-2'-fluorocytidine
  modified_base (21)..(21): 2'-O-methyladenosine
  modified_base (22)..(22): 2'-deoxy-2'-fluoroguanosine
  misc_feature (22)..(23): 5'-phosphonothioate
  modified_base (23)..(23): 2'-O-methyladenosine
auacucuggguguacauuucaga

SEQ ID NO: 6268 - RNA, 23 nt, Artificial Sequence
  siRNA antisense strand against b2GPI
  modified_base (1)..(1): 2'-deoxy-2'-fluoroadenosine
  modified_base (2)..(2): cm
  misc_feature (2)..(3): 5'-phosphonothioate
  modified_base (3)..(3): 2'-deoxy-2'-fluoroadenosine
  modified_base (4)..(4): um
  modified_base (5)..(5): 2'-deoxy-2'-fluoroadenosine
  modified_base (6)..(6): cm
  modified_base (7)..(7): 2'-deoxy-2'-fluorouridine
  modified_base (8)..(8): cm
  modified_base (9)..(9): 2'-deoxy-2'-fluorouridine
  modified_base (10)..(10): gm
  modified_base (11)..(11): gm
  modified_base (12)..(12): 2'-deoxy-2'-fluoroguanosine
  modified_base (13)..(13): um
  modified_base (14)..(14): 2'-deoxy-2'-fluoroguanosine
  modified_base (15)..(15): um
  modified_base (16)..(16): 2'-deoxy-2'-fluoroadenosine
  modified_base (17)..(17): cm
  modified_base (18)..(18): 2'-deoxy-2'-fluoroadenosine
  modified_base (19)..(19): um
  modified_base (20)..(20): 2'-deoxy-2'-fluorouridine
  modified_base (21)..(21): um
  modified_base (22)..(22): 2'-deoxy-2'-fluorocytidine
  misc_feature (22)..(23): 5'-phosphonothioate
  modified_base (23)..(23): 2'-O-methyladenosine
acauacucuggguguacauuuca

SEQ ID NO: 6269 - RNA, 23 nt, Artificial Sequence
  siRNA antisense strand against b2GPI
  modified_base (1)..(1): 2'-deoxy-2'-fluoroadenosine
  modified_base (2)..(2): gm
  misc_feature (2)..(3): 5'-phosphonothioate
  modified_base (3)..(3): 2'-deoxy-2'-fluoroguanosine
  modified_base (4)..(4): 2'-O-methyladenosine
  modified_base (5)..(5): 2'-deoxy-2'-fluorocytidine
  modified_base (6)..(6): 2'-O-methyladenosine
  modified_base (7)..(7): 2'-deoxy-2'-fluorouridine
  modified_base (8)..(8): 2'-O-methyladenosine
  modified_base (9)..(9): 2'-deoxy-2'-fluorocytidine
  modified_base (10)..(10): um
  modified_base (11)..(11): cm
  modified_base (12)..(12): 2'-deoxy-2'-fluorouridine
  modified_base (13)..(13): gm
  modified_base (14)..(14): 2'-deoxy-2'-fluoroguanosine
  modified_base (15)..(15): gm
  modified_base (16)..(16): 2'-deoxy-2'-fluorouridine
  modified_base (17)..(17): gm
  modified_base (18)..(18): 2'-deoxy-2'-fluorouridine
  modified_base (19)..(19): 2'-O-methyladenosine
  modified_base (20)..(20): 2'-deoxy-2'-fluorocytidine
  modified_base (21)..(21): 2'-O-methyladenosine
  modified_base (22)..(22): 2'-deoxy-2'-fluorouridine
  misc_feature (22)..(23): 5'-phosphonothioate
  modified_base (23)..(23): um
aggacauacucuggguguacauu

SEQ ID NO: 6270 - RNA, 23 nt, Artificial Sequence
  siRNA antisense strand against b2GPI
  modified_base (1)..(1): 2'-deoxy-2'-fluoroadenosine
  modified_base (2)..(2): 2'-O-methyladenosine
  misc_feature (2)..(3): 5'-phosphonothioate
  modified_base (3)..(3): 2'-deoxy-2'-fluoroguanosine
  modified_base (4)..(4): gm
  modified_base (5)..(5): 2'-deoxy-2'-fluoroadenosine
  modified_base (6)..(6): cm
  modified_base (7)..(7): 2'-deoxy-2'-fluoroadenosine
  modified_base (8)..(8): um
  modified_base (9)..(9): 2'-deoxy-2'-fluoroadenosine
  modified_base (10)..(10): cm
  modified_base (11)..(11): um
  modified_base (12)..(12): 2'-deoxy-2'-fluorocytidine
  modified_base (13)..(13): um
  modified_base (14)..(14): 2'-deoxy-2'-fluoroguanosine
  modified_base (15)..(15): gm
  modified_base (16)..(16): 2'-deoxy-2'-fluoroguanosine
  modified_base (17)..(17): um
  modified_base (18)..(18): 2'-deoxy-2'-fluoroguanosine
  modified_base (19)..(19): um
  modified_base (20)..(20): 2'-deoxy-2'-fluoroadenosine
  modified_base (21)..(21): cm
  modified_base (22)..(22): 2'-deoxy-2'-fluoroadenosine
  misc_feature (22)..(23): 5'-phosphonothioate
  modified_base (23)..(23): um
aaggacauacucuggguguacau

SEQ ID NO: 6271 - RNA, 23 nt, Artificial Sequence
  siRNA antisense strand against b2GPI
  modified_base (1)..(1): 2'-deoxy-2'-fluoroadenosine
  modified_base (2)..(2): 2'-O-methyladenosine
  misc_feature (2)..(3): 5'-phosphonothioate
  modified_base (3)..(3): 2'-deoxy-2'-fluoroadenosine
  modified_base (4)..(4): gm
  modified_base (5)..(5): 2'-deoxy-2'-fluoroguanosine
  modified_base (6)..(6): 2'-O-methyladenosine
  modified_base (7)..(7): 2'-deoxy-2'-fluorocytidine
  modified_base (8)..(8): 2'-O-methyladenosine
  modified_base (9)..(9): 2'-deoxy-2'-fluorouridine
  modified_base (10)..(10): 2'-O-methyladenosine
  modified_base (11)..(11): cm
  modified_base (12)..(12): 2'-deoxy-2'-fluorouridine
  modified_base (13)..(13): cm
  modified_base (14)..(14): 2'-deoxy-2'-fluorouridine
  modified_base (15)..(15): gm
  modified_base (16)..(16): 2'-deoxy-2'-fluoroguanosine
  modified_base (17)..(17): gm
  modified_base (18)..(18): 2'-deoxy-2'-fluorouridine
  modified_base (19)..(19): gm
  modified_base (20)..(20): 2'-deoxy-2'-fluorouridine
  modified_base (21)..(21): 2'-O-methyladenosine
  modified_base (22)..(22): 2'-deoxy-2'-fluorocytidine
  misc_feature (22)..(23): 5'-phosphonothioate
  modified_base (23)..(23): 2'-O-methyladenosine
aaaggacauacucuggguguaca

SEQ ID NO: 6272 - RNA, 23 nt, Artificial Sequence
  siRNA antisense strand against b2GPI
  modified_base (1)..(1): 2'-deoxy-2'-fluoroadenosine
  modified_base (2)..(2): 2'-O-methyladenosine
  misc_feature (2)..(3): 5'-phosphonothioate
  modified_base (3)..(3): 2'-deoxy-2'-fluoroadenosine
  modified_base (4)..(4): 2'-O-methyladenosine
  modified_base (5)..(5): 2'-deoxy-2'-fluoroguanosine
  modified_base (6)..(6): gm
  modified_base (7)..(7): 2'-deoxy-2'-fluoroadenosine
  modified_base (8)..(8): cm
  modified_base (9)..(9): 2'-deoxy-2'-fluoroadenosine
  modified_base (10)..(10): um
  modified_base (11)..(11): 2'-O-methyladenosine
  modified_base (12)..(12): 2'-deoxy-2'-fluorocytidine
  modified_base (13)..(13): um
  modified_base (14)..(14): 2'-deoxy-2'-fluorocytidine
  modified_base (15)..(15): um
  modified_base (16)..(16): 2'-deoxy-2'-fluoroguanosine
  modified_base (17)..(17): gm
  modified_base (18)..(18): 2'-deoxy-2'-fluoroguanosine
  modified_base (19)..(19): um
  modified_base (20)..(20): 2'-deoxy-2'-fluoroguanosine
  modified_base (21)..(21): um
  modified_base (22)..(22): 2'-deoxy-2'-fluoroadenosine
  misc_feature (22)..(23): 5'-phosphonothioate
  modified_base (23)..(23): cm
aaaaggacauacucuggguguac

SEQ ID NO: 6273 - RNA, 23 nt, Artificial Sequence
  siRNA antisense strand against b2GPI
  modified_base (1)..(1): 2'-deoxy-2'-fluorocytidine
  modified_base (2)..(2): 2'-O-methyladenosine
  misc_feature (2)..(3): 5'-phosphonothioate
  modified_base (3)..(3): 2'-deoxy-2'-fluoroadenosine
  modified_base (4)..(4): 2'-O-methyladenosine
  modified_base (5)..(5): 2'-deoxy-2'-fluoroadenosine
  modified_base (6)..(6): gm
  modified_base (7)..(7): 2'-deoxy-2'-fluoroguanosine
  modified_base (8)..(8): 2'-O-methyladenosine
  modified_base (9)..(9): 2'-deoxy-2'-fluorocytidine
  modified_base (10)..(10): 2'-O-methyladenosine
  modified_base (11)..(11): um
  modified_base (12)..(12): 2'-deoxy-2'-fluoroadenosine
  modified_base (13)..(13): cm
  modified_base (14)..(14): 2'-deoxy-2'-fluorouridine
  modified_base (15)..(15): cm
  modified_base (16)..(16): 2'-deoxy-2'-fluorouridine
  modified_base (17)..(17): gm
  modified_base (18)..(18): 2'-deoxy-2'-fluoroguanosine
  modified_base (19)..(19): gm
  modified_base (20)..(20): 2'-deoxy-2'-fluorouridine
  modified_base (21)..(21): gm
  modified_base (22)..(22): 2'-deoxy-2'-fluorouridine
  misc_feature (22)..(23): 5'-phosphonothioate
  modified_base (23)..(23): 2'-O-methyladenosine
caaaaggacauacucugggugua

SEQ ID NO: 6274 - RNA, 23 nt, Artificial Sequence
  siRNA antisense strand against b2GPI
  modified_base (1)..(1): 2'-deoxy-2'-fluoroadenosine
  modified_base (2)..(2): gm
  misc_feature (2)..(3): 5'-phosphonothioate
  modified_base (3)..(3): 2'-deoxy-2'-fluorocytidine
  modified_base (4)..(4): 2'-O-methyladenosine
  modified_base (5)..(5): 2'-deoxy-2'-fluoroadenosine
  modified_base (6)..(6): 2'-O-methyladenosine
  modified_base (7)..(7): 2'-deoxy-2'-fluoroadenosine
  modified_base (8)..(8): gm
  modified_base (9)..(9): 2'-deoxy-2'-fluoroguanosine
  modified_base (10)..(10): 2'-O-methyladenosine
  modified_base (11)..(11): cm
  modified_base (12)..(12): 2'-deoxy-2'-fluoroadenosine
  modified_base (13)..(13): um
  modified_base (14)..(14): 2'-deoxy-2'-fluoroadenosine
  modified_base (15)..(15): cm
  modified_base (16)..(16): 2'-deoxy-2'-fluorouridine
  modified_base (17)..(17): cm
  modified_base (18)..(18): 2'-deoxy-2'-fluorouridine
  modified_base (19)..(19): gm
  modified_base (20)..(20): 2'-deoxy-2'-fluoroguanosine
  modified_base (21)..(21): gm
  modified_base (22)..(22): 2'-deoxy-2'-fluorouridine
  misc_feature (22)..(23): 5'-phosphonothioate
  modified_base (23)..(23): gm
agcaaaaggacauacucugggug

SEQ ID NO: 6275 - RNA, 23 nt, Artificial Sequence
  siRNA antisense strand against b2GPI
  modified_base (1)..(1): 2'-deoxy-2'-fluorocytidine
  modified_base (2)..(2): 2'-O-methyladenosine
  misc_feature (2)..(3): 5'-phosphonothioate
  modified_base (3)..(3): 2'-deoxy-2'-fluoroguanosine
  modified_base (4)..(4): cm
  modified_base (5)..(5): 2'-deoxy-2'-fluoroadenosine
  modified_base (6)..(6): 2'-O-methyladenosine
  modified_base (7)..(7): 2'-deoxy-2'-fluoroadenosine
  modified_base (8)..(8): 2'-O-methyladenosine
  modified_base (9)..(9): 2'-deoxy-2'-fluoroguanosine
  modified_base (10)..(10): gm
  modified_base (11)..(11): 2'-O-methyladenosine
  modified_base (12)..(12): 2'-deoxy-2'-fluorocytidine
  modified_base (13)..(13): 2'-O-methyladenosine
  modified_base (14)..(14): 2'-deoxy-2'-fluorouridine
  modified_base (15)..(15): 2'-O-methyladenosine
  modified_base (16)..(16): 2'-deoxy-2'-fluorocytidine
  modified_base (17)..(17): um
  modified_base (18)..(18): 2'-deoxy-2'-fluorocytidine
  modified_base (19)..(19): um
  modified_base (20)..(20): 2'-deoxy-2'-fluoroguanosine
  modified_base (21)..(21): gm
  modified_base (22)..(22): 2'-deoxy-2'-fluoroguanosine
  misc_feature (22)..(23): 5'-phosphonothioate
  modified_base (23)..(23): um
cagcaaaaggacauacucugggu

SEQ ID NO: 6276 - RNA, 23 nt, Artificial Sequence
  siRNA antisense strand against b2GPI
  modified_base (1)..(1): 2'-deoxy-2'-fluorocytidine
  modified_base (2)..(2): cm
  misc_feature (2)..(3): 5'-phosphonothioate
  modified_base (3)..(3): 2'-deoxy-2'-fluoroadenosine
  modified_base (4)..(4): gm
  modified_base (5)..(5): 2'-deoxy-2'-fluorocytidine
  modified_base (6)..(6): 2'-O-methyladenosine
  modified_base (7)..(7): 2'-deoxy-2'-fluoroadenosine
  modified_base (8)..(8): 2'-O-methyladenosine
  modified_base (9)..(9): 2'-deoxy-2'-fluoroadenosine
  modified_base (10)..(10): gm
  modified_base (11)..(11): gm
  modified_base (12)..(12): 2'-deoxy-2'-fluoroadenosine
  modified_base (13)..(13): cm
  modified_base (14)..(14): 2'-deoxy-2'-fluoroadenosine
  modified_base (15)..(15): um
  modified_base (16)..(16): 2'-deoxy-2'-fluoroadenosine
  modified_base (17)..(17): cm
  modified_base (18)..(18): 2'-deoxy-2'-fluorouridine
  modified_base (19)..(19): cm
  modified_base (20)..(20): 2'-deoxy-2'-fluorouridine
  modified_base (21)..(21): gm
  modified_base (22)..(22): 2'-deoxy-2'-fluoroguanosine
  misc_feature (22)..(23): 5'-phosphonothioate
  modified_base (23)..(23): gm
ccagcaaaaggacauacucuggg

SEQ ID NO: 6277 - RNA, 23 nt, Artificial Sequence
  siRNA antisense strand against b2GPI
  modified_base (1)..(1): 2'-deoxy-2'-fluorouridine
  modified_base (2)..(2): cm
  misc_feature (2)..(3): 5'-phosphonothioate
  modified_base (3)..(3): 2'-deoxy-2'-fluorocytidine
  modified_base (4)..(4): 2'-O-methyladenosine
  modified_base (5)..(5): 2'-deoxy-2'-fluoroguanosine
  modified_base (6)..(6): cm
  modified_base (7)..(7): 2'-deoxy-2'-fluoroadenosine
  modified_base (8)..(8): 2'-O-methyladenosine
  modified_base (9)..(9): 2'-deoxy-2'-fluoroadenosine
  modified_base (10)..(10): 2'-O-methyladenosine
  modified_base (11)..(11): gm
  modified_base (12)..(12): 2'-deoxy-2'-fluoroguanosine
  modified_base (13)..(13): 2'-O-methyladenosine
  modified_base (14)..(14): 2'-deoxy-2'-fluorocytidine
  modified_base (15)..(15): 2'-O-methyladenosine
  modified_base (16)..(16): 2'-deoxy-2'-fluorouridine
  modified_base (17)..(17): 2'-O-methyladenosine
  modified_base (18)..(18): 2'-deoxy-2'-fluorocytidine
  modified_base (19)..(19): um
  modified_base (20)..(20): 2'-deoxy-2'-fluorocytidine
  modified_base (21)..(21): um
  modified_base (22)..(22): 2'-deoxy-2'-fluoroguanosine
  misc_feature (22)..(23): 5'-phosphonothioate
  modified_base (23)..(23): gm
uccagcaaaaggacauacucugg

SEQ ID NO: 6278 - RNA, 23 nt, Artificial Sequence
  siRNA antisense strand against b2GPI
  modified_base (1)..(1): 2'-deoxy-2'-fluorouridine
  modified_base (2)..(2): um
  misc_feature (2)..(3): 5'-phosphonothioate
  modified_base (3)..(3): 2'-deoxy-2'-fluorocytidine
  modified_base (4)..(4): cm
  modified_base (5)..(5): 2'-deoxy-2'-fluoroadenosine
  modified_base (6)..(6): gm
  modified_base (7)..(7): 2'-deoxy-2'-fluorocytidine
  modified_base (8)..(8): 2'-O-methyladenosine
  modified_base (9)..(9): 2'-deoxy-2'-fluoroadenosine
  modified_base (10)..(10): 2'-O-methyladenosine
  modified_base (11)..(11): 2'-O-methyladenosine
  modified_base (12)..(12): 2'-deoxy-2'-fluoroguanosine
  modified_base (13)..(13): gm
  modified_base (14)..(14): 2'-deoxy-2'-fluoroadenosine
  modified_base (15)..(15): cm
  modified_base (16)..(16): 2'-deoxy-2'-fluoroadenosine
  modified_base (17)..(17): um
  modified_base (18)..(18): 2'-deoxy-2'-fluoroadenosine
  modified_base (19)..(19): cm
  modified_base (20)..(20): 2'-deoxy-2'-fluorouridine
  modified_base (21)..(21): cm
  modified_base (22)..(22): 2'-deoxy-2'-fluorouridine
  misc_feature (22)..(23): 5'-phosphonothioate
  modified_base (23)..(23): gm
uuccagcaaaaggacauacucug

SEQ ID NO: 6279 - RNA, 23 nt, Artificial Sequence
  siRNA antisense strand against b2GPI
  modified_base (1)..(1): 2'-deoxy-2'-fluoroguanosine
  modified_base (2)..(2): 2'-O-methyladenosine
  misc_feature (2)..(3): 5'-phosphonothioate
  modified_base (3)..(3): 2'-deoxy-2'-fluorouridine
  modified_base (4)..(4): um
  modified_base (5)..(5): 2'-deoxy-2'-fluorocytidine
  modified_base (6)..(6): cm
  modified_base (7)..(7): 2'-deoxy-2'-fluoroadenosine
  modified_base (8)..(8): gm
  modified_base (9)..(9): 2'-deoxy-2'-fluorocytidine
  modified_base (10)..(10): 2'-O-methyladenosine
  modified_base (11)..(11): 2'-O-methyladenosine
  modified_base (12)..(12): 2'-deoxy-2'-fluoroadenosine
  modified_base (13)..(13): 2'-O-methyladenosine
  modified_base (14)..(14): 2'-deoxy-2'-fluoroguanosine
  modified_base (15)..(15): gm
  modified_base (16)..(16): 2'-deoxy-2'-fluoroadenosine
  modified_base (17)..(17): cm
  modified_base (18)..(18): 2'-deoxy-2'-fluoroadenosine
  modified_base (19)..(19): um
  modified_base (20)..(20): 2'-deoxy-2'-fluoroadenosine
  modified_base (21)..(21): cm
  modified_base (22)..(22): 2'-deoxy-2'-fluorouridine
  misc_feature (22)..(23): 5'-phosphonothioate
  modified_base (23)..(23): cm
gauuccagcaaaaggacauacuc

SEQ ID NO: 6280 - RNA, 23 nt, Artificial Sequence
  siRNA antisense strand against b2GPI
  modified_base (1)..(1): 2'-deoxy-2'-fluoroadenosine
  modified_base (2)..(2): gm
  misc_feature (2)..(3): 5'-phosphonothioate
  modified_base (3)..(3): 2'-deoxy-2'-fluoroadenosine
  modified_base (4)..(4): um
  modified_base (5)..(5): 2'-deoxy-2'-fluorouridine
  modified_base (6)..(6): cm
  modified_base (7)..(7): 2'-deoxy-2'-fluorocytidine
  modified_base (8)..(8): 2'-O-methyladenosine
  modified_base (9)..(9): 2'-deoxy-2'-fluoroguanosine
  modified_base (10)..(10): cm
  modified_base (11)..(11): 2'-O-methyladenosine
  modified_base (12)..(12): 2'-deoxy-2'-fluoroadenosine
  modified_base (13)..(13): 2'-O-methyladenosine
  modified_base (14)..(14): 2'-deoxy-2'-fluoroadenosine
  modified_base (15)..(15): gm
  modified_base (16)..(16): 2'-deoxy-2'-fluoroguanosine
  modified_base (17)..(17): 2'-O-methyladenosine
  modified_base (18)..(18): 2'-deoxy-2'-fluorocytidine
  modified_base (19)..(19): 2'-O-methyladenosine
  modified_base (20)..(20): 2'-deoxy-2'-fluorouridine
  modified_base (21)..(21): 2'-O-methyladenosine
  modified_base (22)..(22): 2'-deoxy-2'-fluorocytidine
  misc_feature (22)..(23): 5'-phosphonothioate
  modified_base (23)..(23): um
agauuccagcaaaaggacauacu

SEQ ID NO: 6281 - RNA, 23 nt, Artificial Sequence
  siRNA antisense strand against b2GPI
  modified_base (1)..(1): 2'-deoxy-2'-fluoroadenosine
  modified_base (2)..(2): 2'-O-methyladenosine
  misc_feature (2)..(3): 5'-phosphonothioate
  modified_base (3)..(3): 2'-deoxy-2'-fluoroguanosine
  modified_base (4)..(4): 2'-O-methyladenosine
  modified_base (5)..(5): 2'-deoxy-2'-fluorouridine
  modified_base (6)..(6): um
  modified_base (7)..(7): 2'-deoxy-2'-fluorocytidine
  modified_base (8)..(8): cm
  modified_base (9)..(9): 2'-deoxy-2'-fluoroadenosine
  modified_base (10)..(10): gm
  modified_base (11)..(11): cm
  modified_base (12)..(12): 2'-deoxy-2'-fluoroadenosine
  modified_base (13)..(13): 2'-O-methyladenosine
  modified_base (14)..(14): 2'-deoxy-2'-fluoroadenosine
  modified_base (15)..(15): 2'-O-methyladenosine
  modified_base (16)..(16): 2'-deoxy-2'-fluoroguanosine
  modified_base (17)..(17): gm
  modified_base (18)..(18): 2'-deoxy-2'-fluoroadenosine
  modified_base (19)..(19): cm
  modified_base (20)..(20): 2'-deoxy-2'-fluoroadenosine
  modified_base (21)..(21): um
  modified_base (22)..(22): 2'-deoxy-2'-fluoroadenosine
  misc_feature (22)..(23): 5'-phosphonothioate
  modified_base (23)..(23): cm
aagauuccagcaaaaggacauac

SEQ ID NO: 6282 - RNA, 23 nt, Artificial Sequence
  siRNA antisense strand against b2GPI
  modified_base (1)..(1): 2'-deoxy-2'-fluorouridine
  modified_base (2)..(2): 2'-O-methyladenosine
  misc_feature (2)..(3): 5'-phosphonothioate
  modified_base (3)..(3): 2'-deoxy-2'-fluoroadenosine
  modified_base (4)..(4): gm
  modified_base (5)..(5): 2'-deoxy-2'-fluoroadenosine
  modified_base (6)..(6): um
  modified_base (7)..(7): 2'-deoxy-2'-fluorouridine
  modified_base (8)..(8): cm
  modified_base (9)..(9): 2'-deoxy-2'-fluorocytidine
  modified_base (10)..(10): 2'-O-methyladenosine
  modified_base (11)..(11): gm
  modified_base (12)..(12): 2'-deoxy-2'-fluorocytidine
  modified_base (13)..(13): 2'-O-methyladenosine
  modified_base (14)..(14): 2'-deoxy-2'-fluoroadenosine
  modified_base (15)..(15): 2'-O-methyladenosine
  modified_base (16)..(16): 2'-deoxy-2'-fluoroadenosine
  modified_base (17)..(17): gm
  modified_base (18)..(18): 2'-deoxy-2'-fluoroguanosine
  modified_base (19)..(19): 2'-O-methyladenosine
  modified_base (20)..(20): 2'-deoxy-2'-fluorocytidine
  modified_base (21)..(21): 2'-O-methyladenosine
  modified_base (22)..(22): 2'-deoxy-2'-fluorouridine
  misc_feature (22)..(23): 5'-phosphonothioate
  modified_base (23)..(23): 2'-O-methyladenosine
uaagauuccagcaaaaggacaua

SEQ ID NO: 6283 - RNA, 23 nt, Artificial Sequence
  siRNA antisense strand against b2GPI
  modified_base (1)..(1): 2'-deoxy-2'-fluorocytidine
  modified_base (2)..(2): um
  misc_feature (2)..(3): 5'-phosphonothioate
  modified_base (3)..(3): 2'-deoxy-2'-fluoroadenosine
  modified_base (4)..(4): 2'-O-methyladenosine
  modified_base (5)..(5): 2'-deoxy-2'-fluoroguanosine
  modified_base (6)..(6): 2'-O-methyladenosine
  modified_base (7)..(7): 2'-deoxy-2'-fluorouridine
  modified_base (8)..(8): um
  modified_base (9)..(9): 2'-deoxy-2'-fluorocytidine
  modified_base (10)..(10): cm
  modified_base (11)..(11): 2'-O-methyladenosine
  modified_base (12)..(12): 2'-deoxy-2'-fluoroguanosine
  modified_base (13)..(13): cm
  modified_base (14)..(14): 2'-deoxy-2'-fluoroadenosine
  modified_base (15)..(15): 2'-O-methyladenosine
  modified_base (16)..(16): 2'-deoxy-2'-fluoroadenosine
  modified_base (17)..(17): 2'-O-methyladenosine
  modified_base (18)..(18): 2'-deoxy-2'-fluoroguanosine
  modified_base (19)..(19): gm
  modified_base (20)..(20): 2'-deoxy-2'-fluoroadenosine
  modified_base (21)..(21): cm
  modified_base (22)..(22): 2'-deoxy-2'-fluoroadenosine
  misc_feature (22)..(23): 5'-phosphonothioate
  modified_base (23)..(23): um
cuaagauuccagcaaaaggacau

SEQ ID NO: 6284 - RNA, 23 nt, Artificial Sequence
  siRNA antisense strand against b2GPI
  modified_base (1)..(1): 2'-deoxy-2'-fluorouridine
  modified_base (2)..(2): cm
  misc_feature (2)..(3): 5'-phosphonothioate
  modified_base (3)..(3): 2'-deoxy-2'-fluorouridine
  modified_base (4)..(4): 2'-O-methyladenosine
  modified_base (5)..(5): 2'-deoxy-2'-fluoroadenosine
  modified_base (6)..(6): gm
  modified_base (7)..(7): 2'-deoxy-2'-fluoroadenosine
  modified_base (8)..(8): um
  modified_base (9)..(9): 2'-deoxy-2'-fluorouridine
  modified_base (10)..(10): cm
  modified_base (11)..(11): cm
  modified_base (12)..(12): 2'-deoxy-2'-fluoroadenosine
  modified_base (13)..(13): gm
  modified_base (14)..(14): 2'-deoxy-2'-fluorocytidine
  modified_base (15)..(15): 2'-O-methyladenosine
  modified_base (16)..(16): 2'-deoxy-2'-fluoroadenosine
  modified_base (17)..(17): 2'-O-methyladenosine
  modified_base (18)..(18): 2'-deoxy-2'-fluoroadenosine
  modified_base (19)..(19): gm
  modified_base (20)..(20): 2'-deoxy-2'-fluoroguanosine
  modified_base (21)..(21): 2'-O-methyladenosine
  modified_base (22)..(22): 2'-deoxy-2'-fluorocytidine
  misc_feature (22)..(23): 5'-phosphonothioate
  modified_base (23)..(23): 2'-O-methyladenosine
ucuaagauuccagcaaaaggaca

SEQ ID NO: 6285 - RNA, 23 nt, Artificial Sequence
  siRNA antisense strand against b2GPI
  modified_base (1)..(1): 2'-deoxy-2'-fluorouridine
  modified_base (2)..(2): um
  misc_feature (2)..(3): 5'-phosphonothioate
  modified_base (3)..(3): 2'-deoxy-2'-fluorouridine
  modified_base (4)..(4): um
  modified_base (5)..(5): 2'-deoxy-2'-fluorocytidine
  modified_base (6)..(6): um
  modified_base (7)..(7): 2'-deoxy-2'-fluoroadenosine
  modified_base (8)..(8): 2'-O-methyladenosine
  modified_base (9)..(9): 2'-deoxy-2'-fluoroguanosine
  modified_base (10)..(10): 2'-O-methyladenosine
  modified_base (11)..(11): um
  modified_base (12)..(12): 2'-deoxy-2'-fluorouridine
  modified_base (13)..(13): cm
  modified_base (14)..(14): 2'-deoxy-2'-fluorocytidine
  modified_base (15)..(15): 2'-O-methyladenosine
  modified_base (16)..(16): 2'-deoxy-2'-fluoroguanosine
  modified_base (17)..(17): cm
  modified_base (18)..(18): 2'-deoxy-2'-fluoroadenosine
  modified_base (19)..(19): 2'-O-methyladenosine
  modified_base (20)..(20): 2'-deoxy-2'-fluoroadenosine
  modified_base (21)..(21): 2'-O-methyladenosine
  modified_base (22)..(22): 2'-deoxy-2'-fluoroguanosine
  misc_feature (22)..(23): 5'-phosphonothioate
  modified_base (23)..(23): gm
uuuucuaagauuccagcaaaagg

SEQ ID NO: 6286 - RNA, 23 nt, Artificial Sequence
  siRNA antisense strand against b2GPI
  modified_base (1)..(1): 2'-deoxy-2'-fluoroadenosine
  modified_base (2)..(2): um
  misc_feature (2)..(3): 5'-phosphonothioate
  modified_base (3)..(3): 2'-deoxy-2'-fluorouridine
  modified_base (4)..(4): um
  modified_base (5)..(5): 2'-deoxy-2'-fluorouridine
  modified_base (6)..(6): cm
  modified_base (7)..(7): 2'-deoxy-2'-fluorouridine
  modified_base (8)..(8): 2'-O-methyladenosine
  modified_base (9)..(9): 2'-deoxy-2'-fluoroadenosine
  modified_base (10)..(10): gm
  modified_base (11)..(11): 2'-O-methyladenosine
  modified_base (12)..(12): 2'-deoxy-2'-fluorouridine
  modified_base (13)..(13): um
  modified_base (14)..(14): 2'-deoxy-2'-fluorocytidine
  modified_base (15)..(15): cm
  modified_base (16)..(16): 2'-deoxy-2'-fluoroadenosine
  modified_base (17)..(17): gm
  modified_base (18)..(18): 2'-deoxy-2'-fluorocytidine
  modified_base (19)..(19): 2'-O-methyladenosine
  modified_base (20)..(20): 2'-deoxy-2'-fluoroadenosine
  modified_base (21)..(21): 2'-O-methyladenosine
  modified_base (22)..(22): 2'-deoxy-2'-fluoroadenosine
  misc_feature (22)..(23): 5'-phosphonothioate
  modified_base (23)..(23): gm
auuuucuaagauuccagcaaaag

SEQ ID NO: 6287 - RNA, 23 nt, Artificial Sequence
  siRNA antisense strand against b2GPI
  modified_base (1)..(1): 2'-deoxy-2'-fluorocytidine
  modified_base (2)..(2): 2'-O-methyladenosine
  misc_feature (2)..(3): 5'-phosphonothioate
  modified_base (3)..(3): 2'-deoxy-2'-fluorouridine
  modified_base (4)..(4): um
  modified_base (5)..(5): 2'-deoxy-2'-fluorouridine
  modified_base (6)..(6): um
  modified_base (7)..(7): 2'-deoxy-2'-fluorocytidine
  modified_base (8)..(8): um
  modified_base (9)..(9): 2'-deoxy-2'-fluoroadenosine
  modified_base (10)..(10): 2'-O-methyladenosine
  modified_base (11)..(11): gm
  modified_base (12)..(12): 2'-deoxy-2'-fluoroadenosine
  modified_base (13)..(13): um
  modified_base (14)..(14): 2'-deoxy-2'-fluorouridine
  modified_base (15)..(15): cm
  modified_base (16)..(16): 2'-deoxy-2'-fluorocytidine
  modified_base (17)..(17): 2'-O-methyladenosine
  modified_base (18)..(18): 2'-deoxy-2'-fluoroguanosine
  modified_base (19)..(19): cm
  modified_base (20)..(20): 2'-deoxy-2'-fluoroadenosine
  modified_base (21)..(21): 2'-O-methyladenosine
  modified_base (22)..(22): 2'-deoxy-2'-fluoroadenosine
  misc_feature (22)..(23): 5'-phosphonothioate
  modified_base (23)..(23): 2'-O-methyladenosine
cauuuucuaagauuccagcaaaa

SEQ ID NO: 6288 - RNA, 23 nt, Artificial Sequence
  siRNA antisense strand against b2GPI
  modified_base (1)..(1): 2'-deoxy-2'-fluorocytidine
  modified_base (2)..(2): cm
  misc_feature (2)..(3): 5'-phosphonothioate
  modified_base (3)..(3): 2'-deoxy-2'-fluoroadenosine
  modified_base (4)..(4): um
  modified_base (5)..(5): 2'-deoxy-2'-fluorouridine
  modified_base (6)..(6): um
  modified_base (7)..(7): 2'-deoxy-2'-fluorouridine
  modified_base (8)..(8): cm
  modified_base (9)..(9): 2'-deoxy-2'-fluorouridine
  modified_base (10)..(10): 2'-O-methyladenosine
  modified_base (11)..(11): 2'-O-methyladenosine
  modified_base (12)..(12): 2'-deoxy-2'-fluoroguanosine
  modified_base (13)..(13): 2'-O-methyladenosine
  modified_base (14)..(14): 2'-deoxy-2'-fluorouridine
  modified_base (15)..(15): um
  modified_base (16)..(16): 2'-deoxy-2'-fluorocytidine
  modified_base (17)..(17): cm
  modified_base (18)..(18): 2'-deoxy-2'-fluoroadenosine
  modified_base (19)..(19): gm
  modified_base (20)..(20): 2'-deoxy-2'-fluorocytidine
  modified_base (21)..(21): 2'-O-methyladenosine
  modified_base (22)..(22): 2'-deoxy-2'-fluoroadenosine
  misc_feature (22)..(23): 5'-phosphonothioate
  modified_base (23)..(23): 2'-O-methyladenosine
ccauuuucuaagauuccagcaaa

SEQ ID NO: 6289 - RNA, 23 nt, Artificial Sequence
  siRNA antisense strand against b2GPI
  modified_base (1)..(1): 2'-deoxy-2'-fluorouridine
  modified_base (2)..(2): cm
  misc_feature (2)..(3): 5'-phosphonothioate
  modified_base (3)..(3): 2'-deoxy-2'-fluorocytidine
  modified_base (4)..(4): 2'-O-methyladenosine
  modified_base (5)..(5): 2'-deoxy-2'-fluorouridine
  modified_base (6)..(6): um
  modified_base (7)..(7): 2'-deoxy-2'-fluorouridine
  modified_base (8)..(8): um
  modified_base (9)..(9): 2'-deoxy-2'-fluorocytidine
  modified_base (10)..(10): um
  modified_base (11)..(11): 2'-O-methyladenosine
  modified_base (12)..(12): 2'-deoxy-2'-fluoroadenosine
  modified_base (13)..(13): gm
  modified_base (14)..(14): 2'-deoxy-2'-fluoroadenosine
  modified_base (15)..(15): um
  modified_base (16)..(16): 2'-deoxy-2'-fluorouridine
  modified_base (17)..(17): cm
  modified_base (18)..(18): 2'-deoxy-2'-fluorocytidine
  modified_base (19)..(19): 2'-O-methyladenosine
  modified_base (20)..(20): 2'-deoxy-2'-fluoroguanosine
  modified_base (21)..(21): cm
  modified_base (22)..(22): 2'-deoxy-2'-fluoroadenosine
  misc_feature (22)..(23): 5'-phosphonothioate
  modified_base (23)..(23): 2'-O-methyladenosine
uccauuuucuaagauuccagcaa

SEQ ID NO: 6290 - RNA, 23 nt, Artificial Sequence
  siRNA antisense strand against b2GPI
  modified_base (1)..(1): 2'-deoxy-2'-fluorocytidine
  modified_base (2)..(2): um
  misc_feature (2)..(3): 5'-phosphonothioate
  modified_base (3)..(3): 2'-deoxy-2'-fluorocytidine
  modified_base (4)..(4): cm
  modified_base (5)..(5): 2'-deoxy-2'-fluoroadenosine
  modified_base (6)..(6): um
  modified_base (7)..(7): 2'-deoxy-2'-fluorouridine
  modified_base (8)..(8): um
  modified_base (9)..(9): 2'-deoxy-2'-fluorouridine
  modified_base (10)..(10): cm
  modified_base (11)..(11): um
  modified_base (12)..(12): 2'-deoxy-2'-fluoroadenosine
  modified_base (13)..(13): 2'-O-methyladenosine
  modified_base (14)..(14): 2'-deoxy-2'-fluoroguanosine
  modified_base (15)..(15): 2'-O-methyladenosine
  modified_base (16)..(16): 2'-deoxy-2'-fluorouridine
  modified_base (17)..(17): um
  modified_base (18)..(18): 2'-deoxy-2'-fluorocytidine
  modified_base (19)..(19): cm
  modified_base (20)..(20): 2'-deoxy-2'-fluoroadenosine
  modified_base (21)..(21): gm
  modified_base (22)..(22): 2'-deoxy-2'-fluorocytidine
  misc_feature (22)..(23): 5'-phosphonothioate
  modified_base (23)..(23): 2'-O-methyladenosine
cuccauuuucuaagauuccagca

SEQ ID NO: 6291 - RNA, 23 nt, Artificial Sequence
  siRNA antisense strand against b2GPI
  modified_base (1)..(1): 2'-deoxy-2'-fluorouridine
  modified_base (2)..(2): 2'-O-methyladenosine
  misc_feature (2)..(3): 5'-phosphonothioate
  modified_base (3)..(3): 2'-deoxy-2'-fluorocytidine
  modified_base (4)..(4): gm
  modified_base (5)..(5): 2'-deoxy-2'-fluoroguanosine
  modified_base (6)..(6): cm
  modified_base (7)..(7): 2'-deoxy-2'-fluorouridine
  modified_base (8)..(8): cm
  modified_base (9)..(9): 2'-deoxy-2'-fluorocytidine
  modified_base (10)..(10): 2'-O-methyladenosine
  modified_base (11)..(11): um
  modified_base (12)..(12): 2'-deoxy-2'-fluorouridine
  modified_base (13)..(13): um
  modified_base (14)..(14): 2'-deoxy-2'-fluorouridine
  modified_base (15)..(15): cm
  modified_base (16)..(16): 2'-deoxy-2'-fluorouridine
  modified_base (17)..(17): 2'-O-methyladenosine
  modified_base (18)..(18): 2'-deoxy-2'-fluoroadenosine
  modified_base (19)..(19): gm
  modified_base (20)..(20): 2'-deoxy-2'-fluoroadenosine
  modified_base (21)..(21): um
  modified_base (22)..(22): 2'-deoxy-2'-fluorouridine
  misc_feature (22)..(23): 5'-phosphonothioate
  modified_base (23)..(23): cm
uacggcuccauuuucuaagauuc

SEQ ID NO: 6292 - RNA, 23 nt, Artificial Sequence
  siRNA antisense strand against b2GPI
  modified_base (1)..(1): 2'-deoxy-2'-fluoroguanosine
  modified_base (2)..(2): cm
  misc_feature (2)..(3): 5'-phosphonothioate
  modified_base (3)..(3): 2'-deoxy-2'-fluoroguanosine
  modified_base (4)..(4): um
  modified_base (5)..(5): 2'-deoxy-2'-fluoroadenosine
  modified_base (6)..(6): cm
  modified_base (7)..(7): 2'-deoxy-2'-fluoroguanosine
  modified_base (8)..(8): gm
  modified_base (9)..(9): 2'-deoxy-2'-fluorocytidine
  modified_base (10)..(10): um
  modified_base (11)..(11): cm
  modified_base (12)..(12): 2'-deoxy-2'-fluorocytidine
  modified_base (13)..(13): 2'-O-methyladenosine
  modified_base (14)..(14): 2'-deoxy-2'-fluorouridine
  modified_base (15)..(15): um
  modified_base (16)..(16): 2'-deoxy-2'-fluorouridine
  modified_base (17)..(17): um
  modified_base (18)..(18): 2'-deoxy-2'-fluorocytidine
  modified_base (19)..(19): um
  modified_base (20)..(20): 2'-deoxy-2'-fluoroadenosine
  modified_base (21)..(21): 2'-O-methyladenosine
  modified_base (22)..(22): 2'-deoxy-2'-fluoroguanosine
  misc_feature (22)..(23): 5'-phosphonothioate
  modified_base (23)..(23): 2'-O-methyladenosine
gcguacggcuccauuuucuaaga

SEQ ID NO: 6293 - RNA, 23 nt, Artificial Sequence
  siRNA antisense strand against b2GPI
  modified_base (1)..(1): 2'-deoxy-2'-fluoroadenosine
  modified_base (2)..(2): gm
  misc_feature (2)..(3): 5'-phosphonothioate
  modified_base (3)..(3): 2'-deoxy-2'-fluorocytidine
  modified_base (4)..(4): gm
  modified_base (5)..(5): 2'-deoxy-2'-fluorouridine
  modified_base (6)..(6): 2'-O-methyladenosine
  modified_base (7)..(7): 2'-deoxy-2'-fluorocytidine
  modified_base (8)..(8): gm
  modified_base (9)..(9): 2'-deoxy-2'-fluoroguanosine
  modified_base (10)..(10): cm
  modified_base (11)..(11): um
  modified_base (12)..(12): 2'-deoxy-2'-fluorocytidine
  modified_base (13)..(13): cm
  modified_base (14)..(14): 2'-deoxy-2'-fluoroadenosine
  modified_base (15)..(15): um
  modified_base (16)..(16): 2'-deoxy-2'-fluorouridine
  modified_base (17)..(17): um
  modified_base (18)..(18): 2'-deoxy-2'-fluorouridine
  modified_base (19)..(19): cm
  modified_base (20)..(20): 2'-deoxy-2'-fluorouridine
  modified_base (21)..(21): 2'-O-methyladenosine
  modified_base (22)..(22): 2'-deoxy-2'-fluoroadenosine
  misc_feature (22)..(23): 5'-phosphonothioate
  modified_base (23)..(23): gm
agcguacggcuccauuuucuaag

SEQ ID NO: 6294 - RNA, 23 nt, Artificial Sequence
  siRNA antisense strand against b2GPI
  modified_base (1)..(1): 2'-deoxy-2'-fluorouridine
  modified_base (2)..(2): 2'-O-methyladenosine
  misc_feature (2)..(3): 5'-phosphonothioate
  modified_base (3)..(3): 2'-deoxy-2'-fluoroguanosine
  modified_base (4)..(4): cm
  modified_base (5)..(5): 2'-deoxy-2'-fluoroguanosine
  modified_base (6)..(6): um
  modified_base (7)..(7): 2'-deoxy-2'-fluoroadenosine
  modified_base (8)..(8): cm
  modified_base (9)..(9): 2'-deoxy-2'-fluoroguanosine
  modified_base (10)..(10): gm
  modified_base (11)..(11): cm
  modified_base (12)..(12): 2'-deoxy-2'-fluorouridine
  modified_base (13)..(13): cm
  modified_base (14)..(14): 2'-deoxy-2'-fluorocytidine
  modified_base (15)..(15): 2'-O-methyladenosine
  modified_base (16)..(16): 2'-deoxy-2'-fluorouridine
  modified_base (17)..(17): um
  modified_base (18)..(18): 2'-deoxy-2'-fluorouridine
  modified_base (19)..(19): um
  modified_base (20)..(20): 2'-deoxy-2'-fluorocytidine
  modified_base (21)..(21): um
  modified_base (22)..(22): 2'-deoxy-2'-fluoroadenosine
  misc_feature (22)..(23): 5'-phosphonothioate
  modified_base (23)..(23): 2'-O-methyladenosine
uagcguacggcuccauuuucuaa

SEQ ID NO: 6295 - RNA, 23 nt, Artificial Sequence
  siRNA antisense strand against b2GPI
  modified_base (1)..(1): 2'-deoxy-2'-fluoroadenosine
  modified_base (2)..(2): um
  misc_feature (2)..(3): 5'-phosphonothioate
  modified_base (3)..(3): 2'-deoxy-2'-fluoroadenosine
  modified_base (4)..(4): gm
  modified_base (5)..(5): 2'-deoxy-2'-fluorocytidine
  modified_base (6)..(6): gm
  modified_base (7)..(7): 2'-deoxy-2'-fluorouridine
  modified_base (8)..(8): 2'-O-methyladenosine
  modified_base (9)..(9): 2'-deoxy-2'-fluorocytidine
  modified_base (10)..(10): gm
  modified_base (11)..(11): gm
  modified_base (12)..(12): 2'-deoxy-2'-fluorocytidine
  modified_base (13)..(13): um
  modified_base (14)..(14): 2'-deoxy-2'-fluorocytidine
  modified_base (15)..(15): cm
  modified_base (16)..(16): 2'-deoxy-2'-fluoroadenosine
  modified_base (17)..(17): um
  modified_base (18)..(18): 2'-deoxy-2'-fluorouridine
  modified_base (19)..(19): um
  modified_base (20)..(20): 2'-deoxy-2'-fluorouridine
  modified_base (21)..(21): cm
  modified_base (22)..(22): 2'-deoxy-2'-fluorouridine
  misc_feature (22)..(23): 5'-phosphonothioate
  modified_base (23)..(23): 2'-O-methyladenosine
auagcguacggcuccauuuucua

SEQ ID NO: 6296 - RNA, 23 nt, Artificial Sequence
  siRNA antisense strand against b2GPI
  modified_base (1)..(1): 2'-deoxy-2'-fluorouridine
  modified_base (2)..(2): 2'-O-methyladenosine
  misc_feature (2)..(3): 5'-phosphonothioate
  modified_base (3)..(3): 2'-deoxy-2'-fluorouridine
  modified_base (4)..(4): 2'-O-methyladenosine
  modified_base (5)..(5): 2'-deoxy-2'-fluoroguanosine
  modified_base (6)..(6): cm
  modified_base (7)..(7): 2'-deoxy-2'-fluoroguanosine
  modified_base (8)..(8): um
  modified_base (9)..(9): 2'-deoxy-2'-fluoroadenosine
  modified_base (10)..(10): cm
  modified_base (11)..(11): gm
  modified_base (12)..(12): 2'-deoxy-2'-fluoroguanosine
  modified_base (13)..(13): cm
  modified_base (14)..(14): 2'-deoxy-2'-fluorouridine
  modified_base (15)..(15): cm
  modified_base (16)..(16): 2'-deoxy-2'-fluorocytidine
  modified_base (17)..(17): 2'-O-methyladenosine
  modified_base (18)..(18): 2'-deoxy-2'-fluorouridine
  modified_base (19)..(19): um
  modified_base (20)..(20): 2'-deoxy-2'-fluorouridine
  modified_base (21)..(21): um
  modified_base (22)..(22): 2'-deoxy-2'-fluorocytidine
  misc_feature (22)..(23): 5'-phosphonothioate
  modified_base (23)..(23): um
uauagcguacggcuccauuuucu

SEQ ID NO: 6297 - RNA, 23 nt, Artificial Sequence
  siRNA antisense strand against b2GPI
  modified_base (1)..(1): 2'-deoxy-2'-fluorouridine
  modified_base (2)..(2): cm
  misc_feature (2)..(3): 5'-phosphonothioate
  modified_base (3)..(3): 2'-deoxy-2'-fluoroguanosine
  modified_base (4)..(4): um
  modified_base (5)..(5): 2'-deoxy-2'-fluoroadenosine
  modified_base (6)..(6): um
  modified_base (7)..(7): 2'-deoxy-2'-fluoroadenosine
  modified_base (8)..(8): gm
  modified_base (9)..(9): 2'-deoxy-2'-fluorocytidine
  modified_base (10)..(10): gm
  modified_base (11)..(11): um
  modified_base (12)..(12): 2'-deoxy-2'-fluoroadenosine
  modified_base (13)..(13): cm
  modified_base (14)..(14): 2'-deoxy-2'-fluoroguanosine
  modified_base (15)..(15): gm
  modified_base (16)..(16): 2'-deoxy-2'-fluorocytidine
  modified_base (17)..(17): um
  modified_base (18)..(18): 2'-deoxy-2'-fluorocytidine
  modified_base (19)..(19): cm
  modified_base (20)..(20): 2'-deoxy-2'-fluoroadenosine
  modified_base (21)..(21): um
  modified_base (22)..(22): 2'-deoxy-2'-fluorouridine
  misc_feature (22)..(23): 5'-phosphonothioate
  modified_base (23)..(23): um
ucguauagcguacggcuccauuu

SEQ ID NO: 6298 - RNA, 23 nt, Artificial Sequence
  siRNA antisense strand against b2GPI
  modified_base (1)..(1): 2'-deoxy-2'-fluoroguanosine
  modified_base (2)..(2): um
  misc_feature (2)..(3): 5'-phosphonothioate
  modified_base (3)..(3): 2'-deoxy-2'-fluorocytidine
  modified_base (4)..(4): gm
  modified_base (5)..(5): 2'-deoxy-2'-fluorouridine
  modified_base (6)..(6): 2'-O-methyladenosine
  modified_base (7)..(7): 2'-deoxy-2'-fluorouridine
  modified_base (8)..(8): 2'-O-methyladenosine
  modified_base (9)..(9): 2'-deoxy-2'-fluoroguanosine
  modified_base (10)..(10): cm
  modified_base (11)..(11): gm
  modified_base (12)..(12): 2'-deoxy-2'-fluorouridine
  modified_base (13)..(13): 2'-O-methyladenosine
  modified_base (14)..(14): 2'-deoxy-2'-fluorocytidine
  modified_base (15)..(15): gm
  modified_base (16)..(16): 2'-deoxy-2'-fluoroguanosine
  modified_base (17)..(17): cm
  modified_base (18)..(18): 2'-deoxy-2'-fluorouridine
  modified_base (19)..(19): cm
  modified_base (20)..(20): 2'-deoxy-2'-fluorocytidine
  modified_base (21)..(21): 2'-O-methyladenosine
  modified_base (22)..(22): 2'-deoxy-2'-fluorouridine
  misc_feature (22)..(23): 5'-phosphonothioate
  modified_base (23)..(23): um
gucguauagcguacggcuccauu

SEQ ID NO: 6299 - RNA, 23 nt, Artificial Sequence
  siRNA antisense strand against b2GPI
  modified_base (1)..(1): 2'-deoxy-2'-fluoroadenosine
  modified_base (2)..(2): gm
  misc_feature (2)..(3): 5'-phosphonothioate
  modified_base (3)..(3): 2'-deoxy-2'-fluorouridine
  modified_base (4)..(4): cm
  modified_base (5)..(5): 2'-deoxy-2'-fluoroguanosine
  modified_base (6)..(6): um
  modified_base (7)..(7): 2'-deoxy-2'-fluoroadenosine
  modified_base (8)..(8): um
  modified_base (9)..(9): 2'-deoxy-2'-fluoroadenosine
  modified_base (10)..(10): gm
  modified_base (11)..(11): cm
  modified_base (12)..(12): 2'-deoxy-2'-fluoroguanosine
  modified_base (13)..(13): um
  modified_base (14)..(14): 2'-deoxy-2'-fluoroadenosine
  modified_base (15)..(15): cm
  modified_base (16)..(16): 2'-deoxy-2'-fluoroguanosine
  modified_base (17)..(17): gm
  modified_base (18)..(18): 2'-deoxy-2'-fluorocytidine
  modified_base (19)..(19): um
  modified_base (20)..(20): 2'-deoxy-2'-fluorocytidine
  modified_base (21)..(21): cm
  modified_base (22)..(22): 2'-deoxy-2'-fluoroadenosine
  misc_feature (22)..(23): 5'-phosphonothioate
  modified_base (23)..(23): um
agucguauagcguacggcuccau

SEQ ID NO: 6300 - RNA, 23 nt, Artificial Sequence
  siRNA antisense strand against b2GPI
  modified_base (1)..(1): 2'-deoxy-2'-fluoroadenosine
  modified_base (2)..(2): 2'-O-methyladenosine
  misc_feature (2)..(3): 5'-phosphonothioate
  modified_base (3)..(3): 2'-deoxy-2'-fluoroguanosine
  modified_base (4)..(4): um
  modified_base (5)..(5): 2'-deoxy-2'-fluorocytidine
  modified_base (6)..(6): gm
  modified_base (7)..(7): 2'-deoxy-2'-fluorouridine
  modified_base (8)..(8): 2'-O-methyladenosine
  modified_base (9)..(9): 2'-deoxy-2'-fluorouridine
  modified_base (10)..(10): 2'-O-methyladenosine
  modified_base (11)..(11): gm
  modified_base (12)..(12): 2'-deoxy-2'-fluorocytidine
  modified_base (13)..(13): gm
  modified_base (14)..(14): 2'-deoxy-2'-fluorouridine
  modified_base (15)..(15): 2'-O-methyladenosine
  modified_base (16)..(16): 2'-deoxy-2'-fluorocytidine
  modified_base (17)..(17): gm
  modified_base (18)..(18): 2'-deoxy-2'-fluoroguanosine
  modified_base (19)..(19): cm
  modified_base (20)..(20): 2'-deoxy-2'-fluorouridine
  modified_base (21)..(21): cm
  modified_base (22)..(22): 2'-deoxy-2'-fluorocytidine
  misc_feature (22)..(23): 5'-phosphonothioate
  modified_base (23)..(23): 2'-O-methyladenosine
aagucguauagcguacggcucca

SEQ ID NO: 6301 - RNA, 23 nt, Artificial Sequence
  siRNA antisense strand against b2GPI
  modified_base (1)..(1): 2'-deoxy-2'-fluoroadenosine
  modified_base (2)..(2): 2'-O-methyladenosine
  misc_feature (2)..(3): 5'-phosphonothioate
  modified_base (3)..(3): 2'-deoxy-2'-fluoroadenosine
  modified_base (4)..(4): gm
  modified_base (5)..(5): 2'-deoxy-2'-fluorouridine
  modified_base (6)..(6): cm
  modified_base (7)..(7): 2'-deoxy-2'-fluoroguanosine
  modified_base (8)..(8): um
  modified_base (9)..(9): 2'-deoxy-2'-fluoroadenosine
  modified_base (10)..(10): um
  modified_base (11)..(11): 2'-O-methyladenosine
  modified_base (12)..(12): 2'-deoxy-2'-fluoroguanosine
  modified_base (13)..(13): cm
  modified_base (14)..(14): 2'-deoxy-2'-fluoroguanosine
  modified_base (15)..(15): um
  modified_base (16)..(16): 2'-deoxy-2'-fluoroadenosine
  modified_base (17)..(17): cm
  modified_base (18)..(18): 2'-deoxy-2'-fluoroguanosine
  modified_base (19)..(19): gm
  modified_base (20)..(20): 2'-deoxy-2'-fluorocytidine
  modified_base (21)..(21): um
  modified_base (22)..(22): 2'-deoxy-2'-fluorocytidine
  misc_feature (22)..(23): 5'-phosphonothioate
  modified_base (23)..(23): cm
aaagucguauagcguacggcucc

SEQ ID NO: 6302 - RNA, 23 nt, Artificial Sequence
  siRNA antisense strand against b2GPI
  modified_base (1)..(1): 2'-deoxy-2'-fluoroadenosine
  modified_base (2)..(2): 2'-O-methyladenosine
  misc_feature (2)..(3): 5'-phosphonothioate
  modified_base (3)..(3): 2'-deoxy-2'-fluoroadenosine
  modified_base (4)..(4): 2'-O-methyladenosine
  modified_base (5)..(5): 2'-deoxy-2'-fluoroguanosine
  modified_base (6)..(6): um
  modified_base (7)..(7): 2'-deoxy-2'-fluorocytidine
  modified_base (8)..(8): gm
  modified_base (9)..(9): 2'-deoxy-2'-fluorouridine
  modified_base (10)..(10): 2'-O-methyladenosine
  modified_base (11)..(11): um
  modified_base (12)..(12): 2'-deoxy-2'-fluoroadenosine
  modified_base (13)..(13): gm
  modified_base (14)..(14): 2'-deoxy-2'-fluorocytidine
  modified_base (15)..(15): gm
  modified_base (16)..(16): 2'-deoxy-2'-fluorouridine
  modified_base (17)..(17): 2'-O-methyladenosine
  modified_base (18)..(18): 2'-deoxy-2'-fluorocytidine
  modified_base (19)..(19): gm
  modified_base (20)..(20): 2'-deoxy-2'-fluoroguanosine
  modified_base (21)..(21): cm
  modified_base (22)..(22): 2'-deoxy-2'-fluorouridine
  misc_feature (22)..(23): 5'-phosphonothioate
  modified_base (23)..(23): cm
aaaagucguauagcguacggcuc

SEQ ID NO: 6303 - RNA, 23 nt, Artificial Sequence
  siRNA antisense strand against b2GPI
  modified_base (1)..(1): 2'-deoxy-2'-fluorocytidine
  modified_base (2)..(2): 2'-O-methyladenosine
  misc_feature (2)..(3): 5'-phosphonothioate
  modified_base (3)..(3): 2'-deoxy-2'-fluoroadenosine
  modified_base (4)..(4): 2'-O-methyladenosine
  modified_base (5)..(5): 2'-deoxy-2'-fluoroadenosine
  modified_base (6)..(6): gm
  modified_base (7)..(7): 2'-deoxy-2'-fluorouridine
  modified_base (8)..(8): cm
  modified_base (9)..(9): 2'-deoxy-2'-fluoroguanosine
  modified_base (10)..(10): um
  modified_base (11)..(11): 2'-O-methyladenosine
  modified_base (12)..(12): 2'-deoxy-2'-fluorouridine
  modified_base (13)..(13): 2'-O-methyladenosine
  modified_base (14)..(14): 2'-deoxy-2'-fluoroguanosine
  modified_base (15)..(15): cm
  modified_base (16)..(16): 2'-deoxy-2'-fluoroguanosine
  modified_base (17)..(17): um
  modified_base (18)..(18): 2'-deoxy-2'-fluoroadenosine
  modified_base (19)..(19): cm
  modified_base (20)..(20): 2'-deoxy-2'-fluoroguanosine
  modified_base (21)..(21): gm
  modified_base (22)..(22): 2'-deoxy-2'-fluorocytidine
  misc_feature (22)..(23): 5'-phosphonothioate
  modified_base (23)..(23): um
caaaagucguauagcguacggcu

SEQ ID NO: 6304 - RNA, 23 nt, Artificial Sequence
  siRNA antisense strand against b2GPI
  modified_base (1)..(1): 2'-deoxy-2'-fluorouridine
  modified_base (2)..(2): cm
  misc_feature (2)..(3): 5'-phosphonothioate
  modified_base (3)..(3): 2'-deoxy-2'-fluoroadenosine
  modified_base (4)..(4): 2'-O-methyladenosine
  modified_base (5)..(5): 2'-deoxy-2'-fluoroadenosine
  modified_base (6)..(6): 2'-O-methyladenosine
  modified_base (7)..(7): 2'-deoxy-2'-fluoroguanosine
  modified_base (8)..(8): um
  modified_base (9)..(9): 2'-deoxy-2'-fluorocytidine
  modified_base (10)..(10): gm
  modified_base (11)..(11): um
  modified_base (12)..(12): 2'-deoxy-2'-fluoroadenosine
  modified_base (13)..(13): um
  modified_base (14)..(14): 2'-deoxy-2'-fluoroadenosine
  modified_base (15)..(15): gm
  modified_base (16)..(16): 2'-deoxy-2'-fluorocytidine
  modified_base (17)..(17): gm
  modified_base (18)..(18): 2'-deoxy-2'-fluorouridine
  modified_base (19)..(19): 2'-O-methyladenosine
  modified_base (20)..(20): 2'-deoxy-2'-fluorocytidine
  modified_base (21)..(21): gm
  modified_base (22)..(22): 2'-deoxy-2'-fluoroguanosine
  misc_feature (22)..(23): 5'-phosphonothioate
  modified_base (23)..(23): cm
ucaaaagucguauagcguacggc

SEQ ID NO: 6305 - RNA, 23 nt, Artificial Sequence
  siRNA antisense strand against b2GPI
  modified_base (1)..(1): 2'-deoxy-2'-fluorouridine
  modified_base (2)..(2): um
  misc_feature (2)..(3): 5'-phosphonothioate
  modified_base (3)..(3): 2'-deoxy-2'-fluorocytidine
  modified_base (4)..(4): 2'-O-methyladenosine
  modified_base (5)..(5): 2'-deoxy-2'-fluoroadenosine
  modified_base (6)..(6): 2'-O-methyladenosine
  modified_base (7)..(7): 2'-deoxy-2'-fluoroadenosine
  modified_base (8)..(8): gm
  modified_base (9)..(9): 2'-deoxy-2'-fluorouridine
  modified_base (10)..(10): cm
  modified_base (11)..(11): gm
  modified_base (12)..(12): 2'-deoxy-2'-fluorouridine
  modified_base (13)..(13): 2'-O-methyladenosine
  modified_base (14)..(14): 2'-deoxy-2'-fluorouridine
  modified_base (15)..(15): 2'-O-methyladenosine
  modified_base (16)..(16): 2'-deoxy-2'-fluoroguanosine
  modified_base (17)..(17): cm
  modified_base (18)..(18): 2'-deoxy-2'-fluoroguanosine
  modified_base (19)..(19): um
  modified_base (20)..(20): 2'-deoxy-2'-fluoroadenosine
  modified_base (21)..(21): cm
  modified_base (22)..(22): 2'-deoxy-2'-fluoroguanosine
  misc_feature (22)..(23): 5'-phosphonothioate
  modified_base (23)..(23): gm
uucaaaagucguauagcguacgg

SEQ ID NO: 6306 - RNA, 23 nt, Artificial Sequence
  siRNA antisense strand against b2GPI
  modified_base (1)..(1): 2'-deoxy-2'-fluoroadenosine
  modified_base (2)..(2): um
  misc_feature (2)..(3): 5'-phosphonothioate
  modified_base (3)..(3): 2'-deoxy-2'-fluorouridine
  modified_base (4)..(4): cm
  modified_base (5)..(5): 2'-deoxy-2'-fluoroadenosine
  modified_base (6)..(6): 2'-O-methyladenosine
  modified_base (7)..(7): 2'-deoxy-2'-fluoroadenosine
  modified_base (8)..(8): 2'-O-methyladenosine
  modified_base (9)..(9): 2'-deoxy-2'-fluoroguanosine
  modified_base (10)..(10): um
  modified_base (11)..(11): cm
  modified_base (12)..(12): 2'-deoxy-2'-fluoroguanosine
  modified_base (13)..(13): um
  modified_base (14)..(14): 2'-deoxy-2'-fluoroadenosine
  modified_base (15)..(15): um
  modified_base (16)..(16): 2'-deoxy-2'-fluoroadenosine
  modified_base (17)..(17): gm
  modified_base (18)..(18): 2'-deoxy-2'-fluorocytidine
  modified_base (19)..(19): gm
  modified_base (20)..(20): 2'-deoxy-2'-fluorouridine
  modified_base (21)..(21): 2'-O-methyladenosine
  modified_base (22)..(22): 2'-deoxy-2'-fluorocytidine
  misc_feature (22)..(23): 5'-phosphonothioate
  modified_base (23)..(23): gm
auucaaaagucguauagcguacg

SEQ ID NO: 6307 - RNA, 23 nt, Artificial Sequence
  siRNA antisense strand against b2GPI
  modified_base (1)..(1): 2'-deoxy-2'-fluoroadenosine
  modified_base (2)..(2): um
  misc_feature (2)..(3): 5'-phosphonothioate
  modified_base (3)..(3): 2'-deoxy-2'-fluoroadenosine
  modified_base (4)..(4): um
  modified_base (5)..(5): 2'-deoxy-2'-fluorouridine
  modified_base (6)..(6): cm
  modified_base (7)..(7): 2'-deoxy-2'-fluoroadenosine
  modified_base (8)..(8): 2'-O-methyladenosine
  modified_base (9)..(9): 2'-deoxy-2'-fluoroadenosine
  modified_base (10)..(10): 2'-O-methyladenosine
  modified_base (11)..(11): gm
  modified_base (12)..(12): 2'-deoxy-2'-fluorouridine
  modified_base (13)..(13): cm
  modified_base (14)..(14): 2'-deoxy-2'-fluoroguanosine
  modified_base (15)..(15): um
  modified_base (16)..(16): 2'-deoxy-2'-fluoroadenosine
  modified_base (17)..(17): um
  modified_base (18)..(18): 2'-deoxy-2'-fluoroadenosine
  modified_base (19)..(19): gm
  modified_base (20)..(20): 2'-deoxy-2'-fluorocytidine
  modified_base (21)..(21): gm
  modified_base (22)..(22): 2'-deoxy-2'-fluorouridine
  misc_feature (22)..(23): 5'-phosphonothioate
  modified_base (23)..(23): 2'-O-methyladenosine
auauucaaaagucguauagcgua

SEQ ID NO: 6308 - RNA, 23 nt, Artificial Sequence
  siRNA antisense strand against b2GPI
  modified_base (1)..(1): 2'-deoxy-2'-fluoroguanosine
  modified_base (2)..(2): 2'-O-methyladenosine
  misc_feature (2)..(3): 5'-phosphonothioate
  modified_base (3)..(3): 2'-deoxy-2'-fluorouridine
  modified_base (4)..(4): 2'-O-methyladenosine
  modified_base (5)..(5): 2'-deoxy-2'-fluorouridine
  modified_base (6)..(6): um
  modified_base (7)..(7): 2'-deoxy-2'-fluorocytidine
  modified_base (8)..(8): 2'-O-methyladenosine
  modified_base (9)..(9): 2'-deoxy-2'-fluoroadenosine
  modified_base (10)..(10): 2'-O-methyladenosine
  modified_base (11)..(11): 2'-O-methyladenosine
  modified_base (12)..(12): 2'-deoxy-2'-fluoroguanosine
  modified_base (13)..(13): um
  modified_base (14)..(14): 2'-deoxy-2'-fluorocytidine
  modified_base (15)..(15): gm
  modified_base (16)..(16): 2'-deoxy-2'-fluorouridine
  modified_base (17)..(17): 2'-O-methyladenosine
  modified_base (18)..(18): 2'-deoxy-2'-fluorouridine
  modified_base (19)..(19): 2'-O-methyladenosine
  modified_base (20)..(20): 2'-deoxy-2'-fluoroguanosine
  modified_base (21)..(21): cm
  modified_base (22)..(22): 2'-deoxy-2'-fluoroguanosine
  misc_feature (22)..(23): 5'-phosphonothioate
  modified_base (23)..(23): um
gauauucaaaagucguauagcgu

SEQ ID NO: 6309 - RNA, 23 nt, Artificial Sequence
  siRNA antisense strand against b2GPI
  modified_base (1)..(1): 2'-deoxy-2'-fluorouridine
  modified_base (2)..(2): gm
  misc_feature (2)..(3): 5'-phosphonothioate
  modified_base (3)..(3): 2'-deoxy-2'-fluoroguanosine
  modified_base (4)..(4): gm
  modified_base (5)..(5): 2'-deoxy-2'-fluoroadenosine
  modified_base (6)..(6): um
  modified_base (7)..(7): 2'-deoxy-2'-fluoroadenosine
  modified_base (8)..(8): um
  modified_base (9)..(9): 2'-deoxy-2'-fluorouridine
  modified_base (10)..(10): cm
  modified_base (11)..(11): 2'-O-methyladenosine
  modified_base (12)..(12): 2'-deoxy-2'-fluoroadenosine
  modified_base (13)..(13): 2'-O-methyladenosine
  modified_base (14)..(14): 2'-deoxy-2'-fluoroadenosine
  modified_base (15)..(15): gm
  modified_base (16)..(16): 2'-deoxy-2'-fluorouridine
  modified_base (17)..(17): cm
  modified_base (18)..(18): 2'-deoxy-2'-fluoroguanosine
  modified_base (19)..(19): um
  modified_base (20)..(20): 2'-deoxy-2'-fluoroadenosine
  modified_base (21)..(21): um
  modified_base (22)..(22): 2'-deoxy-2'-fluoroadenosine
  misc_feature (22)..(23): 5'-phosphonothioate
  modified_base (23)..(23): gm
ugggauauucaaaagucguauag

SEQ ID NO: 6310 - RNA, 23 nt, Artificial Sequence
  siRNA antisense strand against b2GPI
  modified_base (1)..(1): 2'-deoxy-2'-fluorouridine
  modified_base (2)..(2): um
  misc_feature (2)..(3): 5'-phosphonothioate
  modified_base (3)..(3): 2'-deoxy-2'-fluoroguanosine
  modified_base (4)..(4): gm
  modified_base (5)..(5): 2'-deoxy-2'-fluoroguanosine
  modified_base (6)..(6): 2'-O-methyladenosine
  modified_base (7)..(7): 2'-deoxy-2'-fluorouridine
  modified_base (8)..(8): 2'-O-methyladenosine
  modified_base (9)..(9): 2'-deoxy-2'-fluorouridine
  modified_base (10)..(10): um
  modified_base (11)..(11): cm
  modified_base (12)..(12): 2'-deoxy-2'-fluoroadenosine
  modified_base (13)..(13): 2'-O-methyladenosine
  modified_base (14)..(14): 2'-deoxy-2'-fluoroadenosine
  modified_base (15)..(15): 2'-O-methyladenosine
  modified_base (16)..(16): 2'-deoxy-2'-fluoroguanosine
  modified_base (17)..(17): um
  modified_base (18)..(18): 2'-deoxy-2'-fluorocytidine
  modified_base (19)..(19): gm
  modified_base (20)..(20): 2'-deoxy-2'-fluorouridine
  modified_base (21)..(21): 2'-O-methyladenosine
  modified_base (22)..(22): 2'-deoxy-2'-fluorouridine
  misc_feature (22)..(23): 5'-phosphonothioate
  modified_base (23)..(23): 2'-O-methyladenosine
uugggauauucaaaagucguaua

SEQ ID NO: 6311 - RNA, 23 nt, Artificial Sequence
  siRNA antisense strand against b2GPI
  modified_base (1)..(1): 2'-deoxy-2'-fluoroguanosine
  modified_base (2)..(2): um
  misc_feature (2)..(3): 5'-phosphonothioate
  modified_base (3)..(3): 2'-deoxy-2'-fluorouridine
  modified_base (4)..(4): gm
  modified_base (5)..(5): 2'-deoxy-2'-fluoroguanosine
  modified_base (6)..(6): gm
  modified_base (7)..(7): 2'-deoxy-2'-fluoroadenosine
  modified_base (8)..(8): um
  modified_base (9)..(9): 2'-deoxy-2'-fluoroadenosine
  modified_base (10)..(10): um
  modified_base (11)..(11): um
  modified_base (12)..(12): 2'-deoxy-2'-fluorocytidine
  modified_base (13)..(13): 2'-O-methyladenosine
  modified_base (14)..(14): 2'-deoxy-2'-fluoroadenosine
  modified_base (15)..(15): 2'-O-methyladenosine
  modified_base (16)..(16): 2'-deoxy-2'-fluoroadenosine
  modified_base (17)..(17): gm
  modified_base (18)..(18): 2'-deoxy-2'-fluorouridine
  modified_base (19)..(19): cm
  modified_base (20)..(20): 2'-deoxy-2'-fluoroguanosine
  modified_base (21)..(21): um
  modified_base (22)..(22): 2'-deoxy-2'-fluoroadenosine
  misc_feature (22)..(23): 5'-phosphonothioate
  modified_base (23)..(23): um
guugggauauucaaaagucguau

SEQ ID NO: 6312 - RNA, 23 nt, Artificial Sequence
  siRNA antisense strand against b2GPI
  modified_base (1)..(1): 2'-deoxy-2'-fluorouridine
  modified_base (2)..(2): gm
  misc_feature (2)..(3): 5'-phosphonothioate
  modified_base (3)..(3): 2'-deoxy-2'-fluorouridine
  modified_base (4)..(4): um
  modified_base (5)..(5): 2'-deoxy-2'-fluoroguanosine
  modified_base (6)..(6): gm
  modified_base (7)..(7): 2'-deoxy-2'-fluoroguanosine
  modified_base (8)..(8): 2'-O-methyladenosine
  modified_base (9)..(9): 2'-deoxy-2'-fluorouridine
  modified_base (10)..(10): 2'-O-methyladenosine
  modified_base (11)..(11): um
  modified_base (12)..(12): 2'-deoxy-2'-fluorouridine
  modified_base (13)..(13): cm
  modified_base (14)..(14): 2'-deoxy-2'-fluoroadenosine
  modified_base (15)..(15): 2'-O-methyladenosine
  modified_base (16)..(16): 2'-deoxy-2'-fluoroadenosine
  modified_base (17)..(17): 2'-O-methyladenosine
  modified_base (18)..(18): 2'-deoxy-2'-fluoroguanosine
  modified_base (19)..(19): um
  modified_base (20)..(20): 2'-deoxy-2'-fluorocytidine
  modified_base (21)..(21): gm
  modified_base (22)..(22): 2'-deoxy-2'-fluorouridine
  misc_feature (22)..(23): 5'-phosphonothioate
  modified_base (23)..(23): 2'-O-methyladenosine
uguugggauauucaaaagucgua

SEQ ID NO: 6313 - RNA, 23 nt, Artificial Sequence
  siRNA antisense strand against b2GPI
  modified_base (1)..(1): 2'-deoxy-2'-fluorouridine
  modified_base (2)..(2): cm
  misc_feature (2)..(3): 5'-phosphonothioate
  modified_base (3)..(3): 2'-deoxy-2'-fluoroguanosine
  modified_base (4)..(4): um
  modified_base (5)..(5): 2'-deoxy-2'-fluoroguanosine
  modified_base (6)..(6): um
  modified_base (7)..(7): 2'-deoxy-2'-fluorouridine
  modified_base (8)..(8): gm
  modified_base (9)..(9): 2'-deoxy-2'-fluoroguanosine
  modified_base (10)..(10): gm
  modified_base (11)..(11): 2'-O-methyladenosine
  modified_base (12)..(12): 2'-deoxy-2'-fluorouridine
  modified_base (13)..(13): 2'-O-methyladenosine
  modified_base (14)..(14): 2'-deoxy-2'-fluorouridine
  modified_base (15)..(15): um
  modified_base (16)..(16): 2'-deoxy-2'-fluorocytidine
  modified_base (17)..(17): 2'-O-methyladenosine
  modified_base (18)..(18): 2'-deoxy-2'-fluoroadenosine
  modified_base (19)..(19): 2'-O-methyladenosine
  modified_base (20)..(20): 2'-deoxy-2'-fluoroadenosine
  modified_base (21)..(21): gm
  modified_base (22)..(22): 2'-deoxy-2'-fluorouridine
  misc_feature (22)..(23): 5'-phosphonothioate
  modified_base (23)..(23): cm
ucguguugggauauucaaaaguc

SEQ ID NO: 6314 - RNA, 23 nt, Artificial Sequence
  siRNA antisense strand against b2GPI
  modified_base (1)..(1): 2'-deoxy-2'-fluoroadenosine
  modified_base (2)..(2): um
  misc_feature (2)..(3): 5'-phosphonothioate
  modified_base (3)..(3): 2'-deoxy-2'-fluorocytidine
  modified_base (4)..(4): gm
  modified_base (5)..(5): 2'-deoxy-2'-fluorouridine
  modified_base (6)..(6): gm
  modified_base (7)..(7): 2'-deoxy-2'-fluorouridine
  modified_base (8)..(8): um
  modified_base (9)..(9): 2'-deoxy-2'-fluoroguanosine
  modified_base (10)..(10): gm
  modified_base (11)..(11): gm
  modified_base (12)..(12): 2'-deoxy-2'-fluoroadenosine
  modified_base (13)..(13): um
  modified_base (14)..(14): 2'-deoxy-2'-fluoroadenosine
  modified_base (15)..(15): um
  modified_base (16)..(16): 2'-deoxy-2'-fluorouridine
  modified_base (17)..(17): cm
  modified_base (18)..(18): 2'-deoxy-2'-fluoroadenosine
  modified_base (19)..(19): 2'-O-methyladenosine
  modified_base (20)..(20): 2'-deoxy-2'-fluoroadenosine
  modified_base (21)..(21): 2'-O-methyladenosine
  modified_base (22)..(22): 2'-deoxy-2'-fluoroguanosine
  misc_feature (22)..(23): 5'-phosphonothioate
  modified_base (23)..(23): um
aucguguugggauauucaaaagu

SEQ ID NO: 6315 - RNA, 23 nt, Artificial Sequence
  siRNA antisense strand against b2GPI
  modified_base (1)..(1): 2'-deoxy-2'-fluoroguanosine
  modified_base (2)..(2): 2'-O-methyladenosine
  misc_feature (2)..(3): 5'-phosphonothioate
  modified_base (3)..(3): 2'-deoxy-2'-fluorouridine
  modified_base (4)..(4): cm
  modified_base (5)..(5): 2'-deoxy-2'-fluoroguanosine
  modified_base (6)..(6): um
  modified_base (7)..(7): 2'-deoxy-2'-fluoroguanosine
  modified_base (8)..(8): um
  modified_base (9)..(9): 2'-deoxy-2'-fluorouridine
  modified_base (10)..(10): gm
  modified_base (11)..(11): gm
  modified_base (12)..(12): 2'-deoxy-2'-fluoroguanosine
  modified_base (13)..(13): 2'-O-methyladenosine
  modified_base (14)..(14): 2'-deoxy-2'-fluorouridine
  modified_base (15)..(15): 2'-O-methyladenosine
  modified_base (16)..(16): 2'-deoxy-2'-fluorouridine
  modified_base (17)..(17): um
  modified_base (18)..(18): 2'-deoxy-2'-fluorocytidine
  modified_base (19)..(19): 2'-O-methyladenosine
  modified_base (20)..(20): 2'-deoxy-2'-fluoroadenosine
  modified_base (21)..(21): 2'-O-methyladenosine
  modified_base (22)..(22): 2'-deoxy-2'-fluoroadenosine
  misc_feature (22)..(23): 5'-phosphonothioate
  modified_base (23)..(23): gm
gaucguguugggauauucaaaag

SEQ ID NO: 6316 - RNA, 23 nt, Artificial Sequence
  siRNA antisense strand against b2GPI
  modified_base (1)..(1): 2'-deoxy-2'-fluorouridine
  modified_base (2)..(2): gm
  misc_feature (2)..(3): 5'-phosphonothioate
  modified_base (3)..(3): 2'-deoxy-2'-fluoroadenosine
  modified_base (4)..(4): um
  modified_base (5)..(5): 2'-deoxy-2'-fluorocytidine
  modified_base (6)..(6): gm
  modified_base (7)..(7): 2'-deoxy-2'-fluorouridine
  modified_base (8)..(8): gm
  modified_base (9)..(9): 2'-deoxy-2'-fluorouridine
  modified_base (10)..(10): um
  modified_base (11)..(11): gm
  modified_base (12)..(12): 2'-deoxy-2'-fluoroguanosine
  modified_base (13)..(13): gm
  modified_base (14)..(14): 2'-deoxy-2'-fluoroadenosine
  modified_base (15)..(15): um
  modified_base (16)..(16): 2'-deoxy-2'-fluoroadenosine
  modified_base (17)..(17): um
  modified_base (18)..(18): 2'-deoxy-2'-fluorouridine
  modified_base (19)..(19): cm
  modified_base (20)..(20): 2'-deoxy-2'-fluoroadenosine
  modified_base (21)..(21): 2'-O-methyladenosine
  modified_base (22)..(22): 2'-deoxy-2'-fluoroadenosine
  misc_feature (22)..(23): 5'-phosphonothioate
  modified_base (23)..(23): 2'-O-methyladenosine
ugaucguguugggauauucaaaa

SEQ ID NO: 6317 - RNA, 23 nt, Artificial Sequence
  siRNA antisense strand against b2GPI
  modified_base (1)..(1): 2'-deoxy-2'-fluoroadenosine
  modified_base (2)..(2): 2'-O-methyladenosine
  misc_feature (2)..(3): 5'-phosphonothioate
  modified_base (3)..(3): 2'-deoxy-2'-fluorocytidine
  modified_base (4)..(4): um
  modified_base (5)..(5): 2'-deoxy-2'-fluoroguanosine
  modified_base (6)..(6): 2'-O-methyladenosine
  modified_base (7)..(7): 2'-deoxy-2'-fluorouridine
  modified_base (8)..(8): cm
  modified_base (9)..(9): 2'-deoxy-2'-fluoroguanosine
  modified_base (10)..(10): um
  modified_base (11)..(11): gm
  modified_base (12)..(12): 2'-deoxy-2'-fluorouridine
  modified_base (13)..(13): um
  modified_base (14)..(14): 2'-deoxy-2'-fluoroguanosine
  modified_base (15)..(15): gm
  modified_base (16)..(16): 2'-deoxy-2'-fluoroguanosine
  modified_base (17)..(17): 2'-O-methyladenosine
  modified_base (18)..(18): 2'-deoxy-2'-fluorouridine
  modified_base (19)..(19): 2'-O-methyladenosine
  modified_base (20)..(20): 2'-deoxy-2'-fluorouridine
  modified_base (21)..(21): um
  modified_base (22)..(22): 2'-deoxy-2'-fluorocytidine
  misc_feature (22)..(23): 5'-phosphonothioate
  modified_base (23)..(23): 2'-O-methyladenosine
aacugaucguguugggauauuca

SEQ ID NO: 6318 - RNA, 23 nt, Artificial Sequence
  siRNA antisense strand against b2GPI
  modified_base (1)..(1): 2'-deoxy-2'-fluoroadenosine
  modified_base (2)..(2): 2'-O-methyladenosine
  misc_feature (2)..(3): 5'-phosphonothioate
  modified_base (3)..(3): 2'-deoxy-2'-fluoroadenosine
  modified_base (4)..(4): cm
  modified_base (5)..(5): 2'-deoxy-2'-fluorouridine
  modified_base (6)..(6): gm
  modified_base (7)..(7): 2'-deoxy-2'-fluoroadenosine
  modified_base (8)..(8): um
  modified_base (9)..(9): 2'-deoxy-2'-fluorocytidine
  modified_base (10)..(10): gm
  modified_base (11)..(11): um
  modified_base (12)..(12): 2'-deoxy-2'-fluoroguanosine
  modified_base (13)..(13): um
  modified_base (14)..(14): 2'-deoxy-2'-fluorouridine
  modified_base (15)..(15): gm
  modified_base (16)..(16): 2'-deoxy-2'-fluoroguanosine
  modified_base (17)..(17): gm
  modified_base (18)..(18): 2'-deoxy-2'-fluoroadenosine
  modified_base (19)..(19): um
  modified_base (20)..(20): 2'-deoxy-2'-fluoroadenosine
  modified_base (21)..(21): um
  modified_base (22)..(22): 2'-deoxy-2'-fluorouridine
  misc_feature (22)..(23): 5'-phosphonothioate
  modified_base (23)..(23): cm
aaacugaucguguugggauauuc

SEQ ID NO: 6319 - RNA, 23 nt, Artificial Sequence
  siRNA antisense strand against b2GPI
  modified_base (1)..(1): 2'-deoxy-2'-fluoroadenosine
  modified_base (2)..(2): 2'-O-methyladenosine
  misc_feature (2)..(3): 5'-phosphonothioate
  modified_base (3)..(3): 2'-deoxy-2'-fluoroadenosine
  modified_base (4)..(4): 2'-O-methyladenosine
  modified_base (5)..(5): 2'-deoxy-2'-fluorocytidine
  modified_base (6)..(6): um
  modified_base (7)..(7): 2'-deoxy-2'-fluoroguanosine
  modified_base (8)..(8): 2'-O-methyladenosine
  modified_base (9)..(9): 2'-deoxy-2'-fluorouridine
  modified_base (10)..(10): cm
  modified_base (11)..(11): gm
  modified_base (12)..(12): 2'-deoxy-2'-fluorouridine
  modified_base (13)..(13): gm
  modified_base (14)..(14): 2'-deoxy-2'-fluorouridine
  modified_base (15)..(15): um
  modified_base (16)..(16): 2'-deoxy-2'-fluoroguanosine
  modified_base (17)..(17): gm
  modified_base (18)..(18): 2'-deoxy-2'-fluoroguanosine
  modified_base (19)..(19): 2'-O-methyladenosine
  modified_base (20)..(20): 2'-deoxy-2'-fluorouridine
  modified_base (21)..(21): 2'-O-methyladenosine
  modified_base (22)..(22): 2'-deoxy-2'-fluorouridine
  misc_feature (22)..(23): 5'-phosphonothioate
  modified_base (23)..(23): um
aaaacugaucguguugggauauu

SEQ ID NO: 6320 - RNA, 23 nt, Artificial Sequence
  siRNA antisense strand against b2GPI
  modified_base (1)..(1): 2'-deoxy-2'-fluoroadenosine
  modified_base (2)..(2): 2'-O-methyladenosine
  misc_feature (2)..(3): 5'-phosphonothioate
  modified_base (3)..(3): 2'-deoxy-2'-fluoroadenosine
  modified_base (4)..(4): 2'-O-methyladenosine
  modified_base (5)..(5): 2'-deoxy-2'-fluoroadenosine
  modified_base (6)..(6): cm
  modified_base (7)..(7): 2'-deoxy-2'-fluorouridine
  modified_base (8)..(8): gm
  modified_base (9)..(9): 2'-deoxy-2'-fluoroadenosine
  modified_base (10)..(10): um
  modified_base (11)..(11): cm
  modified_base (12)..(12): 2'-deoxy-2'-fluoroguanosine
  modified_base (13)..(13): um
  modified_base (14)..(14): 2'-deoxy-2'-fluoroguanosine
  modified_base (15)..(15): um
  modified_base (16)..(16): 2'-deoxy-2'-fluorouridine
  modified_base (17)..(17): gm
  modified_base (18)..(18): 2'-deoxy-2'-fluoroguanosine
  modified_base (19)..(19): gm
  modified_base (20)..(20): 2'-deoxy-2'-fluoroadenosine
  modified_base (21)..(21): um
  modified_base (22)..(22): 2'-deoxy-2'-fluoroadenosine
  misc_feature (22)..(23): 5'-phosphonothioate
  modified_base (23)..(23): um
aaaaacugaucguguugggauau

SEQ ID NO: 6321 - RNA, 23 nt, Artificial Sequence
  siRNA antisense strand against b2GPI
  modified_base (1)..(1): 2'-deoxy-2'-fluoroguanosine
  modified_base (2)..(2): 2'-O-methyladenosine
  misc_feature (2)..(3): 5'-phosphonothioate
  modified_base (3)..(3): 2'-deoxy-2'-fluoroadenosine
  modified_base (4)..(4): 2'-O-methyladenosine
  modified_base (5)..(5): 2'-deoxy-2'-fluoroadenosine
  modified_base (6)..(6): 2'-O-methyladenosine
  modified_base (7)..(7): 2'-deoxy-2'-fluorocytidine
  modified_base (8)..(8): um
  modified_base (9)..(9): 2'-deoxy-2'-fluoroguanosine
  modified_base (10)..(10): 2'-O-methyladenosine
  modified_base (11)..(11): um
  modified_base (12)..(12): 2'-deoxy-2'-fluorocytidine
  modified_base (13)..(13): gm
  modified_base (14)..(14): 2'-deoxy-2'-fluorouridine
  modified_base (15)..(15): gm
  modified_base (16)..(16): 2'-deoxy-2'-fluorouridine
  modified_base (17)..(17): um
  modified_base (18)..(18): 2'-deoxy-2'-fluoroguanosine
  modified_base (19)..(19): gm
  modified_base (20)..(20): 2'-deoxy-2'-fluoroguanosine
  modified_base (21)..(21): 2'-O-methyladenosine
  modified_base (22)..(22): 2'-deoxy-2'-fluorouridine
  misc_feature (22)..(23): 5'-phosphonothioate
  modified_base (23)..(23): 2'-O-methyladenosine
gaaaaacugaucguguugggaua

SEQ ID NO: 6322 - RNA, 23 nt, Artificial Sequence
  siRNA antisense strand against b2GPI
  modified_base (1)..(1): 2'-deoxy-2'-fluoroadenosine
  modified_base (2)..(2): gm
  misc_feature (2)..(3): 5'-phosphonothioate
  modified_base (3)..(3): 2'-deoxy-2'-fluoroadenosine
  modified_base (4)..(4): 2'-O-methyladenosine
  modified_base (5)..(5): 2'-deoxy-2'-fluoroadenosine
  modified_base (6)..(6): 2'-O-methyladenosine
  modified_base (7)..(7): 2'-deoxy-2'-fluoroadenosine
  modified_base (8)..(8): cm
  modified_base (9)..(9): 2'-deoxy-2'-fluorouridine
  modified_base (10)..(10): gm
  modified_base (11)..(11): 2'-O-methyladenosine
  modified_base (12)..(12): 2'-deoxy-2'-fluorouridine
  modified_base (13)..(13): cm
  modified_base (14)..(14): 2'-deoxy-2'-fluoroguanosine
  modified_base (15)..(15): um
  modified_base (16)..(16): 2'-deoxy-2'-fluoroguanosine
  modified_base (17)..(17): um
  modified_base (18)..(18): 2'-deoxy-2'-fluorouridine
  modified_base (19)..(19): gm
  modified_base (20)..(20): 2'-deoxy-2'-fluoroguanosine
  modified_base (21)..(21): gm
  modified_base (22)..(22): 2'-deoxy-2'-fluoroadenosine
  misc_feature (22)..(23): 5'-phosphonothioate
  modified_base (23)..(23): um
agaaaaacugaucguguugggau

SEQ ID NO: 6323 - RNA, 23 nt, Artificial Sequence
  siRNA antisense strand against b2GPI
  modified_base (1)..(1): 2'-deoxy-2'-fluoroadenosine
  modified_base (2)..(2): 2'-O-methyladenosine
  misc_feature (2)..(3): 5'-phosphonothioate
  modified_base (3)..(3): 2'-deoxy-2'-fluoroguanosine
  modified_base (4)..(4): 2'-O-methyladenosine
  modified_base (5)..(5): 2'-deoxy-2'-fluoroadenosine
  modified_base (6)..(6): 2'-O-methyladenosine
  modified_base (7)..(7): 2'-deoxy-2'-fluoroadenosine
  modified_base (8)..(8): 2'-O-methyladenosine
  modified_base (9)..(9): 2'-deoxy-2'-fluorocytidine
  modified_base (10)..(10): um
  modified_base (11)..(11): gm
  modified_base (12)..(12): 2'-deoxy-2'-fluoroadenosine
  modified_base (13)..(13): um
  modified_base (14)..(14): 2'-deoxy-2'-fluorocytidine
  modified_base (15)..(15): gm
  modified_base (16)..(16): 2'-deoxy-2'-fluorouridine
  modified_base (17)..(17): gm
  modified_base (18)..(18): 2'-deoxy-2'-fluorouridine
  modified_base (19)..(19): um
  modified_base (20)..(20): 2'-deoxy-2'-fluoroguanosine
  modified_base (21)..(21): gm
  modified_base (22)..(22): 2'-deoxy-2'-fluoroguanosine
  misc_feature (22)..(23): 5'-phosphonothioate
  modified_base (23)..(23): 2'-O-methyladenosine
aagaaaaacugaucguguuggga

SEQ ID NO: 6324 - RNA, 23 nt, Artificial Sequence
  siRNA antisense strand against b2GPI
  modified_base (1)..(1): 2'-deoxy-2'-fluoroadenosine
  modified_base (2)..(2): cm
  misc_feature (2)..(3): 5'-phosphonothioate
  modified_base (3)..(3): 2'-deoxy-2'-fluoroadenosine
  modified_base (4)..(4): 2'-O-methyladenosine
  modified_base (5)..(5): 2'-deoxy-2'-fluoroguanosine
  modified_base (6)..(6): 2'-O-methyladenosine
  modified_base (7)..(7): 2'-deoxy-2'-fluoroadenosine
  modified_base (8)..(8): 2'-O-methyladenosine
  modified_base (9)..(9): 2'-deoxy-2'-fluoroadenosine
  modified_base (10)..(10): 2'-O-methyladenosine
  modified_base (11)..(11): cm
  modified_base (12)..(12): 2'-deoxy-2'-fluorouridine
  modified_base (13)..(13): gm
  modified_base (14)..(14): 2'-deoxy-2'-fluoroadenosine
  modified_base (15)..(15): um
  modified_base (16)..(16): 2'-deoxy-2'-fluorocytidine
  modified_base (17)..(17): gm
  modified_base (18)..(18): 2'-deoxy-2'-fluorouridine
  modified_base (19)..(19): gm
  modified_base (20)..(20): 2'-deoxy-2'-fluorouridine
  modified_base (21)..(21): um
  modified_base (22)..(22): 2'-deoxy-2'-fluoroguanosine
  misc_feature (22)..(23): 5'-phosphonothioate
  modified_base (23)..(23): gm
acaagaaaaacugaucguguugg

SEQ ID NO: 6325 - RNA, 23 nt, Artificial Sequence
  siRNA antisense strand against b2GPI
  modified_base (1)..(1): 2'-deoxy-2'-fluorouridine
  modified_base (2)..(2): 2'-O-methyladenosine
  misc_feature (2)..(3): 5'-phosphonothioate
  modified_base (3)..(3): 2'-deoxy-2'-fluorocytidine
  modified_base (4)..(4): 2'-O-methyladenosine
  modified_base (5)..(5): 2'-deoxy-2'-fluoroadenosine
  modified_base (6)..(6): gm
  modified_base (7)..(7): 2'-deoxy-2'-fluoroadenosine
  modified_base (8)..(8): 2'-O-methyladenosine
  modified_base (9)..(9): 2'-deoxy-2'-fluoroadenosine
  modified_base (10)..(10): 2'-O-methyladenosine
  modified_base (11)..(11): 2'-O-methyladenosine
  modified_base (12)..(12): 2'-deoxy-2'-fluorocytidine
  modified_base (13)..(13): um
  modified_base (14)..(14): 2'-deoxy-2'-fluoroguanosine
  modified_base (15)..(15): 2'-O-methyladenosine
  modified_base (16)..(16): 2'-deoxy-2'-fluorouridine
  modified_base (17)..(17): cm
  modified_base (18)..(18): 2'-deoxy-2'-fluoroguanosine
  modified_base (19)..(19): um
  modified_base (20)..(20): 2'-deoxy-2'-fluoroguanosine
  modified_base (21)..(21): um
  modified_base (22)..(22): 2'-deoxy-2'-fluorouridine
  misc_feature (22)..(23): 5'-phosphonothioate
  modified_base (23)..(23): gm
uacaagaaaaacugaucguguug

SEQ ID NO: 6326 - RNA, 23 nt, Artificial Sequence
  siRNA antisense strand against b2GPI
  modified_base (1)..(1): 2'-deoxy-2'-fluorouridine
  modified_base (2)..(2): um
  misc_feature (2)..(3): 5'-phosphonothioate
  modified_base (3)..(3): 2'-deoxy-2'-fluoroadenosine
  modified_base (4)..(4): cm
  modified_base (5)..(5): 2'-deoxy-2'-fluoroadenosine
  modified_base (6)..(6): 2'-O-methyladenosine
  modified_base (7)..(7): 2'-deoxy-2'-fluoroguanosine
  modified_base (8)..(8): 2'-O-methyladenosine
  modified_base (9)..(9): 2'-deoxy-2'-fluoroadenosine
  modified_base (10)..(10): 2'-O-methyladenosine
  modified_base (11)..(11): 2'-O-methyladenosine
  modified_base (12)..(12): 2'-deoxy-2'-fluoroadenosine
  modified_base (13)..(13): cm
  modified_base (14)..(14): 2'-deoxy-2'-fluorouridine
  modified_base (15)..(15): gm
  modified_base (16)..(16): 2'-deoxy-2'-fluoroadenosine
  modified_base (17)..(17): um
  modified_base (18)..(18): 2'-deoxy-2'-fluorocytidine
  modified_base (19)..(19): gm
  modified_base (20)..(20): 2'-deoxy-2'-fluorouridine
  modified_base (21)..(21): gm
  modified_base (22)..(22): 2'-deoxy-2'-fluorouridine
  misc_feature (22)..(23): 5'-phosphonothioate
  modified_base (23)..(23): um
uuacaagaaaaacugaucguguu

SEQ ID NO: 6327 - RNA, 23 nt, Artificial Sequence
  siRNA antisense strand against b2GPI
  modified_base (1)..(1): 2'-deoxy-2'-fluoroguanosine
  modified_base (2)..(2): um
  misc_feature (2)..(3): 5'-phosphonothioate
  modified_base (3)..(3): 2'-deoxy-2'-fluorouridine
  modified_base (4)..(4): 2'-O-methyladenosine
  modified_base (5)..(5): 2'-deoxy-2'-fluorocytidine
  modified_base (6)..(6): 2'-O-methyladenosine
  modified_base (7)..(7): 2'-deoxy-2'-fluoroadenosine
  modified_base (8)..(8): gm
  modified_base (9)..(9): 2'-deoxy-2'-fluoroadenosine
  modified_base (10)..(10): 2'-O-methyladenosine
  modified_base (11)..(11): 2'-O-methyladenosine
  modified_base (12)..(12): 2'-deoxy-2'-fluoroadenosine
  modified_base (13)..(13): 2'-O-methyladenosine
  modified_base (14)..(14): 2'-deoxy-2'-fluorocytidine
  modified_base (15)..(15): um
  modified_base (16)..(16): 2'-deoxy-2'-fluoroguanosine
  modified_base (17)..(17): 2'-O-methyladenosine
  modified_base (18)..(18): 2'-deoxy-2'-fluorouridine
  modified_base (19)..(19): cm
  modified_base (20)..(20): 2'-deoxy-2'-fluoroguanosine
  modified_base (21)..(21): um
  modified_base (22)..(22): 2'-deoxy-2'-fluoroguanosine
  misc_feature (22)..(23): 5'-phosphonothioate
  modified_base (23)..(23): um
guuacaagaaaaacugaucgugu

SEQ ID NO: 6328 - RNA, 23 nt, Artificial Sequence
  siRNA antisense strand against b2GPI
  modified_base (1)..(1): 2'-deoxy-2'-fluorouridine
  modified_base (2)..(2): gm
  misc_feature (2)..(3): 5'-phosphonothioate
  modified_base (3)..(3): 2'-deoxy-2'-fluorouridine
  modified_base (4)..(4): um
  modified_base (5)..(5): 2'-deoxy-2'-fluoroadenosine
  modified_base (6)..(6): cm
  modified_base (7)..(7): 2'-deoxy-2'-fluoroadenosine
  modified_base (8)..(8): 2'-O-methyladenosine
  modified_base (9)..(9): 2'-deoxy-2'-fluoroguanosine
  modified_base (10)..(10): 2'-O-methyladenosine
  modified_base (11)..(11): 2'-O-methyladenosine
  modified_base (12)..(12): 2'-deoxy-2'-fluoroadenosine
  modified_base (13)..(13): 2'-O-methyladenosine
  modified_base (14)..(14): 2'-deoxy-2'-fluoroadenosine
  modified_base (15)..(15): cm
  modified_base (16)..(16): 2'-deoxy-2'-fluorouridine
  modified_base (17)..(17): gm
  modified_base (18)..(18): 2'-deoxy-2'-fluoroadenosine
  modified_base (19)..(19): um
  modified_base (20)..(20): 2'-deoxy-2'-fluorocytidine
  modified_base (21)..(21): gm
  modified_base (22)..(22): 2'-deoxy-2'-fluorouridine
  misc_feature (22)..(23): 5'-phosphonothioate
  modified_base (23)..(23): gm
uguuacaagaaaaacugaucgug

SEQ ID NO: 6329 - RNA, 23 nt, Artificial Sequence
  siRNA antisense strand against b2GPI
  modified_base (1)..(1): 2'-deoxy-2'-fluoroadenosine
  modified_base (2)..(2): gm
  misc_feature (2)..(3): 5'-phosphonothioate
  modified_base (3)..(3): 2'-deoxy-2'-fluorouridine
  modified_base (4)..(4): gm
  modified_base (5)..(5): 2'-deoxy-2'-fluorouridine
  modified_base (6)..(6): um
  modified_base (7)..(7): 2'-deoxy-2'-fluoroadenosine
  modified_base (8)..(8): cm
  modified_base (9)..(9): 2'-deoxy-2'-fluoroadenosine
  modified_base (10)..(10): 2'-O-methyladenosine
  modified_base (11)..(11): gm
  modified_base (12)..(12): 2'-deoxy-2'-fluoroadenosine
  modified_base (13)..(13): 2'-O-methyladenosine
  modified_base (14)..(14): 2'-deoxy-2'-fluoroadenosine
  modified_base (15)..(15): 2'-O-methyladenosine
  modified_base (16)..(16): 2'-deoxy-2'-fluoroadenosine
  modified_base (17)..(17): cm
  modified_base (18)..(18): 2'-deoxy-2'-fluorouridine
  modified_base (19)..(19): gm
  modified_base (20)..(20): 2'-deoxy-2'-fluoroadenosine
  modified_base (21)..(21): um
  modified_base (22)..(22): 2'-deoxy-2'-fluorocytidine
  misc_feature (22)..(23): 5'-phosphonothioate
  modified_base (23)..(23): gm
aguguuacaagaaaaacugaucg

SEQ ID NO: 6330 - RNA, 23 nt, Artificial Sequence
  siRNA antisense strand against b2GPI
  modified_base (1)..(1): 2'-deoxy-2'-fluorocytidine
  modified_base (2)..(2): 2'-O-methyladenosine
  misc_feature (2)..(3): 5'-phosphonothioate
  modified_base (3)..(3): 2'-deoxy-2'-fluoroguanosine
  modified_base (4)..(4): um
  modified_base (5)..(5): 2'-deoxy-2'-fluoroguanosine
  modified_base (6)..(6): um
  modified_base (7)..(7): 2'-deoxy-2'-fluorouridine
  modified_base (8)..(8): 2'-O-methyladenosine
  modified_base (9)..(9): 2'-deoxy-2'-fluorocytidine
  modified_base (10)..(10): 2'-O-methyladenosine
  modified_base (11)..(11): 2'-O-methyladenosine
  modified_base (12)..(12): 2'-deoxy-2'-fluoroguanosine
  modified_base (13)..(13): 2'-O-methyladenosine
  modified_base (14)..(14): 2'-deoxy-2'-fluoroadenosine
  modified_base (15)..(15): 2'-O-methyladenosine
  modified_base (16)..(16): 2'-deoxy-2'-fluoroadenosine
  modified_base (17)..(17): 2'-O-methyladenosine
  modified_base (18)..(18): 2'-deoxy-2'-fluorocytidine
  modified_base (19)..(19): um
  modified_base (20)..(20): 2'-deoxy-2'-fluoroguanosine
  modified_base (21)..(21): 2'-O-methyladenosine
  modified_base (22)..(22): 2'-deoxy-2'-fluorouridine
  misc_feature (22)..(23): 5'-phosphonothioate
  modified_base (23)..(23): cm
caguguuacaagaaaaacugauc

SEQ ID NO: 6331 - RNA, 23 nt, Artificial Sequence
  siRNA antisense strand against b2GPI
  modified_base (1)..(1): 2'-deoxy-2'-fluoroadenosine
  modified_base (2)..(2): 2'-O-methyladenosine
  misc_feature (2)..(3): 5'-phosphonothioate
  modified_base (3)..(3): 2'-deoxy-2'-fluoroadenosine
  modified_base (4)..(4): 2'-O-methyladenosine
  modified_base (5)..(5): 2'-deoxy-2'-fluorocytidine
  modified_base (6)..(6): cm
  modified_base (7)..(7): 2'-deoxy-2'-fluorocytidine
  modified_base (8)..(8): 2'-O-methyladenosine
  modified_base (9)..(9): 2'-deoxy-2'-fluoroguanosine
  modified_base (10)..(10): um
  modified_base (11)..(11): gm
  modified_base (12)..(12): 2'-deoxy-2'-fluorouridine
  modified_base (13)..(13): um
  modified_base (14)..(14): 2'-deoxy-2'-fluoroadenosine
  modified_base (15)..(15): cm
  modified_base (16)..(16): 2'-deoxy-2'-fluoroadenosine
  modified_base (17)..(17): 2'-O-methyladenosine
  modified_base (18)..(18): 2'-deoxy-2'-fluoroguanosine
  modified_base (19)..(19): 2'-O-methyladenosine
  modified_base (20)..(20): 2'-deoxy-2'-fluoroadenosine
  modified_base (21)..(21): 2'-O-methyladenosine
  modified_base (22)..(22): 2'-deoxy-2'-fluoroadenosine
  misc_feature (22)..(23): 5'-phosphonothioate
  modified_base (23)..(23): 2'-O-methyladenosine
aaaacccaguguuacaagaaaaa

SEQ ID NO: 6332 - RNA, 23 nt, Artificial Sequence
  siRNA antisense strand against b2GPI
  modified_base (1)..(1): 2'-deoxy-2'-fluorouridine
  modified_base (2)..(2): 2'-O-methyladenosine
  misc_feature (2)..(3): 5'-phosphonothioate
  modified_base (3)..(3): 2'-deoxy-2'-fluoroadenosine
  modified_base (4)..(4): 2'-O-methyladenosine
  modified_base (5)..(5): 2'-deoxy-2'-fluoroadenosine
  modified_base (6)..(6): cm
  modified_base (7)..(7): 2'-deoxy-2'-fluorocytidine
  modified_base (8)..(8): cm
  modified_base (9)..(9): 2'-deoxy-2'-fluoroadenosine
  modified_base (10)..(10): gm
  modified_base (11)..(11): um
  modified_base (12)..(12): 2'-deoxy-2'-fluoroguanosine
  modified_base (13)..(13): um
  modified_base (14)..(14): 2'-deoxy-2'-fluorouridine
  modified_base (15)..(15): 2'-O-methyladenosine
  modified_base (16)..(16): 2'-deoxy-2'-fluorocytidine
  modified_base (17)..(17): 2'-O-methyladenosine
  modified_base (18)..(18): 2'-deoxy-2'-fluoroadenosine
  modified_base (19)..(19): gm
  modified_base (20)..(20): 2'-deoxy-2'-fluoroadenosine
  modified_base (21)..(21): 2'-O-methyladenosine
  modified_base (22)..(22): 2'-deoxy-2'-fluoroadenosine
  misc_feature (22)..(23): 5'-phosphonothioate
  modified_base (23)..(23): 2'-O-methyladenosine
uaaaacccaguguuacaagaaaa

SEQ ID NO: 6333 - RNA, 23 nt, Artificial Sequence
  siRNA antisense strand against b2GPI
  modified_base (1)..(1): 2'-deoxy-2'-fluoroadenosine
  modified_base (2)..(2): um
  misc_feature (2)..(3): 5'-phosphonothioate
  modified_base (3)..(3): 2'-deoxy-2'-fluoroadenosine
  modified_base (4)..(4): 2'-O-methyladenosine
  modified_base (5)..(5): 2'-deoxy-2'-fluoroadenosine
  modified_base (6)..(6): 2'-O-methyladenosine
  modified_base (7)..(7): 2'-deoxy-2'-fluorocytidine
  modified_base (8)..(8): cm
  modified_base (9)..(9): 2'-deoxy-2'-fluorocytidine
  modified_base (10)..(10): 2'-O-methyladenosine
  modified_base (11)..(11): gm
  modified_base (12)..(12): 2'-deoxy-2'-fluorouridine
  modified_base (13)..(13): gm
  modified_base (14)..(14): 2'-deoxy-2'-fluorouridine
  modified_base (15)..(15): um
  modified_base (16)..(16): 2'-deoxy-2'-fluoroadenosine
  modified_base (17)..(17): cm
  modified_base (18)..(18): 2'-deoxy-2'-fluoroadenosine
  modified_base (19)..(19): 2'-O-methyladenosine
  modified_base (20)..(20): 2'-deoxy-2'-fluoroguanosine
  modified_base (21)..(21): 2'-O-methyladenosine
  modified_base (22)..(22): 2'-deoxy-2'-fluoroadenosine
  misc_feature (22)..(23): 5'-phosphonothioate
  modified_base (23)..(23): 2'-O-methyladenosine
auaaaacccaguguuacaagaaa

SEQ ID NO: 6334 - RNA, 23 nt, Artificial Sequence
  siRNA antisense strand against b2GPI
  modified_base (1)..(1): 2'-deoxy-2'-fluoroguanosine
  modified_base (2)..(2): 2'-O-methyladenosine
  misc_feature (2)..(3): 5'-phosphonothioate
  modified_base (3)..(3): 2'-deoxy-2'-fluorouridine
  modified_base (4)..(4): 2'-O-methyladenosine
  modified_base (5)..(5): 2'-deoxy-2'-fluoroadenosine
  modified_base (6)..(6): 2'-O-methyladenosine
  modified_base (7)..(7): 2'-deoxy-2'-fluoroadenosine
  modified_base (8)..(8): cm
  modified_base (9)..(9): 2'-deoxy-2'-fluorocytidine
  modified_base (10)..(10): cm
  modified_base (11)..(11): 2'-O-methyladenosine
  modified_base (12)..(12): 2'-deoxy-2'-fluoroguanosine
  modified_base (13)..(13): um
  modified_base (14)..(14): 2'-deoxy-2'-fluoroguanosine
  modified_base (15)..(15): um
  modified_base (16)..(16): 2'-deoxy-2'-fluorouridine
  modified_base (17)..(17): 2'-O-methyladenosine
  modified_base (18)..(18): 2'-deoxy-2'-fluorocytidine
  modified_base (19)..(19): 2'-O-methyladenosine
  modified_base (20)..(20): 2'-deoxy-2'-fluoroadenosine
  modified_base (21)..(21): gm
  modified_base (22)..(22): 2'-deoxy-2'-fluoroadenosine
  misc_feature (22)..(23): 5'-phosphonothioate
  modified_base (23)..(23): 2'-O-methyladenosine
gauaaaacccaguguuacaagaa

SEQ ID NO: 6335 - RNA, 23 nt, Artificial Sequence
  siRNA antisense strand against b2GPI
  modified_base (1)..(1): 2'-deoxy-2'-fluoroadenosine
  modified_base (2)..(2): gm
  misc_feature (2)..(3): 5'-phosphonothioate
  modified_base (3)..(3): 2'-deoxy-2'-fluoroadenosine
  modified_base (4)..(4): um
  modified_base (5)..(5): 2'-deoxy-2'-fluoroadenosine
  modified_base (6)..(6): 2'-O-methyladenosine
  modified_base (7)..(7): 2'-deoxy-2'-fluoroadenosine
  modified_base (8)..(8): 2'-O-methyladenosine
  modified_base (9)..(9): 2'-deoxy-2'-fluorocytidine
  modified_base (10)..(10): cm
  modified_base (11)..(11): cm
  modified_base (12)..(12): 2'-deoxy-2'-fluoroadenosine
  modified_base (13)..(13): gm
  modified_base (14)..(14): 2'-deoxy-2'-fluorouridine
  modified_base (15)..(15): gm
  modified_base (16)..(16): 2'-deoxy-2'-fluorouridine
  modified_base (17)..(17): um
  modified_base (18)..(18): 2'-deoxy-2'-fluoroadenosine
  modified_base (19)..(19): cm
  modified_base (20)..(20): 2'-deoxy-2'-fluoroadenosine
  modified_base (21)..(21): 2'-O-methyladenosine
  modified_base (22)..(22): 2'-deoxy-2'-fluoroguanosine
  misc_feature (22)..(23): 5'-phosphonothioate
  modified_base (23)..(23): 2'-O-methyladenosine
agauaaaacccaguguuacaaga

SEQ ID NO: 6336 - RNA, 23 nt, Artificial Sequence
  siRNA antisense strand against b2GPI
  modified_base (1)..(1): 2'-deoxy-2'-fluorouridine
  modified_base (2)..(2): cm
  misc_feature (2)..(3): 5'-phosphonothioate
  modified_base (3)..(3): 2'-deoxy-2'-fluoroadenosine
  modified_base (4)..(4): gm
  modified_base (5)..(5): 2'-deoxy-2'-fluoroadenosine
  modified_base (6)..(6): um
  modified_base (7)..(7): 2'-deoxy-2'-fluoroadenosine
  modified_base (8)..(8): 2'-O-methyladenosine
  modified_base (9)..(9): 2'-deoxy-2'-fluoroadenosine
  modified_base (10)..(10): 2'-O-methyladenosine
  modified_base (11)..(11): cm
  modified_base (12)..(12): 2'-deoxy-2'-fluorocytidine
  modified_base (13)..(13): cm
  modified_base (14)..(14): 2'-deoxy-2'-fluoroadenosine
  modified_base (15)..(15): gm
  modified_base (16)..(16): 2'-deoxy-2'-fluorouridine
  modified_base (17)..(17): gm
  modified_base (18)..(18): 2'-deoxy-2'-fluorouridine
  modified_base (19)..(19): um
  modified_base (20)..(20): 2'-deoxy-2'-fluoroadenosine
  modified_base (21)..(21): cm
  modified_base (22)..(22): 2'-deoxy-2'-fluoroadenosine
  misc_feature (22)..(23): 5'-phosphonothioate
  modified_base (23)..(23): 2'-O-methyladenosine
ucagauaaaacccaguguuacaa

SEQ ID NO: 6337 - RNA, 23 nt, Artificial Sequence
  siRNA antisense strand against b2GPI
  modified_base (1)..(1): 2'-deoxy-2'-fluorouridine
  modified_base (2)..(2): um
  misc_feature (2)..(3): 5'-phosphonothioate
  modified_base (3)..(3): 2'-deoxy-2'-fluorocytidine
  modified_base (4)..(4): 2'-O-methyladenosine
  modified_base (5)..(5): 2'-deoxy-2'-fluoroguanosine
  modified_base (6)..(6): 2'-O-methyladenosine
  modified_base (7)..(7): 2'-deoxy-2'-fluorouridine
  modified_base (8)..(8): 2'-O-methyladenosine
  modified_base (9)..(9): 2'-deoxy-2'-fluoroadenosine
  modified_base (10)..(10): 2'-O-methyladenosine
  modified_base (11)..(11): 2'-O-methyladenosine
  modified_base (12)..(12): 2'-deoxy-2'-fluorocytidine
  modified_base (13)..(13): cm
  modified_base (14)..(14): 2'-deoxy-2'-fluorocytidine
  modified_base (15)..(15): 2'-O-methyladenosine
  modified_base (16)..(16): 2'-deoxy-2'-fluoroguanosine
  modified_base (17)..(17): um
  modified_base (18)..(18): 2'-deoxy-2'-fluoroguanosine
  modified_base (19)..(19): um
  modified_base (20)..(20): 2'-deoxy-2'-fluorouridine
  modified_base (21)..(21): 2'-O-methyladenosine
  modified_base (22)..(22): 2'-deoxy-2'-fluorocytidine
  misc_feature (22)..(23): 5'-phosphonothioate
  modified_base (23)..(23): 2'-O-methyladenosine
uucagauaaaacccaguguuaca

SEQ ID NO: 6338 - RNA, 23 nt, Artificial Sequence
  siRNA antisense strand against b2GPI
  modified_base (1)..(1): 2'-deoxy-2'-fluoroadenosine
  modified_base (2)..(2): um
  misc_feature (2)..(3): 5'-phosphonothioate
  modified_base (3)..(3): 2'-deoxy-2'-fluorouridine
  modified_base (4)..(4): cm
  modified_base (5)..(5): 2'-deoxy-2'-fluoroadenosine
  modified_base (6)..(6): gm
  modified_base (7)..(7): 2'-deoxy-2'-fluoroadenosine
  modified_base (8)..(8): um
  modified_base (9)..(9): 2'-deoxy-2'-fluoroadenosine
  modified_base (10)..(10): 2'-O-methyladenosine
  modified_base (11)..(11): 2'-O-methyladenosine
  modified_base (12)..(12): 2'-deoxy-2'-fluoroadenosine
  modified_base (13)..(13): cm
  modified_base (14)..(14): 2'-deoxy-2'-fluorocytidine
  modified_base (15)..(15): cm
  modified_base (16)..(16): 2'-deoxy-2'-fluoroadenosine
  modified_base (17)..(17): gm
  modified_base (18)..(18): 2'-deoxy-2'-fluorouridine
  modified_base (19)..(19): gm
  modified_base (20)..(20): 2'-deoxy-2'-fluorouridine
  modified_base (21)..(21): um
  modified_base (22)..(22): 2'-deoxy-2'-fluoroadenosine
  misc_feature (22)..(23): 5'-phosphonothioate
  modified_base (23)..(23): cm
auucagauaaaacccaguguuac

SEQ ID NO: 6339 - RNA, 23 nt, Artificial Sequence
  siRNA antisense strand against b2GPI
  modified_base (1)..(1): 2'-deoxy-2'-fluorocytidine
  modified_base (2)..(2): cm
  misc_feature (2)..(3): 5'-phosphonothioate
  modified_base (3)..(3): 2'-deoxy-2'-fluoroadenosine
  modified_base (4)..(4): um
  modified_base (5)..(5): 2'-deoxy-2'-fluorouridine
  modified_base (6)..(6): cm
  modified_base (7)..(7): 2'-deoxy-2'-fluoroadenosine
  modified_base (8)..(8): gm
  modified_base (9)..(9): 2'-deoxy-2'-fluoroadenosine
  modified_base (10)..(10): um
  modified_base (11)..(11): 2'-O-methyladenosine
  modified_base (12)..(12): 2'-deoxy-2'-fluoroadenosine
  modified_base (13)..(13): 2'-O-methyladenosine
  modified_base (14)..(14): 2'-deoxy-2'-fluoroadenosine
  modified_base (15)..(15): cm
  modified_base (16)..(16): 2'-deoxy-2'-fluorocytidine
  modified_base (17)..(17): cm
  modified_base (18)..(18): 2'-deoxy-2'-fluoroadenosine
  modified_base (19)..(19): gm
  modified_base (20)..(20): 2'-deoxy-2'-fluorouridine
  modified_base (21)..(21): gm
  modified_base (22)..(22): 2'-deoxy-2'-fluorouridine
  misc_feature (22)..(23): 5'-phosphonothioate
  modified_base (23)..(23): um
ccauucagauaaaacccaguguu

SEQ ID NO: 6340 - RNA, 23 nt, Artificial Sequence
  siRNA antisense strand against b2GPI
  modified_base (1)..(1): 2'-deoxy-2'-fluorocytidine
  modified_base (2)..(2): gm
  misc_feature (2)..(3): 5'-phosphonothioate
  modified_base (3)..(3): 2'-deoxy-2'-fluorocytidine
  modified_base (4)..(4): cm
  modified_base (5)..(5): 2'-deoxy-2'-fluoroadenosine
  modified_base (6)..(6): um
  modified_base (7)..(7): 2'-deoxy-2'-fluorouridine
  modified_base (8)..(8): cm
  modified_base (9)..(9): 2'-deoxy-2'-fluoroadenosine
  modified_base (10)..(10): gm
  modified_base (11)..(11): 2'-O-methyladenosine
  modified_base (12)..(12): 2'-deoxy-2'-fluorouridine
  modified_base (13)..(13): 2'-O-methyladenosine
  modified_base (14)..(14): 2'-deoxy-2'-fluoroadenosine
  modified_base (15)..(15): 2'-O-methyladenosine
  modified_base (16)..(16): 2'-deoxy-2'-fluoroadenosine
  modified_base (17)..(17): cm
  modified_base (18)..(18): 2'-deoxy-2'-fluorocytidine
  modified_base (19)..(19): cm
  modified_base (20)..(20): 2'-deoxy-2'-fluoroadenosine
  modified_base (21)..(21): gm
  modified_base (22)..(22): 2'-deoxy-2'-fluorouridine
  misc_feature (22)..(23): 5'-phosphonothioate
  modified_base (23)..(23): gm
cgccauucagauaaaacccagug

SEQ ID NO: 6341 - RNA, 23 nt, Artificial Sequence
  siRNA antisense strand against b2GPI
  modified_base (1)..(1): 2'-deoxy-2'-fluoroguanosine
  modified_base (2)..(2): cm
  misc_feature (2)..(3): 5'-phosphonothioate
  modified_base (3)..(3): 2'-deoxy-2'-fluoroguanosine
  modified_base (4)..(4): cm
  modified_base (5)..(5): 2'-deoxy-2'-fluorocytidine
  modified_base (6)..(6): 2'-O-methyladenosine
  modified_base (7)..(7): 2'-deoxy-2'-fluorouridine
  modified_base (8)..(8): um
  modified_base (9)..(9): 2'-deoxy-2'-fluorocytidine
  modified_base (10)..(10): 2'-O-methyladenosine
  modified_base (11)..(11): gm
  modified_base (12)..(12): 2'-deoxy-2'-fluoroadenosine
  modified_base (13)..(13): um
  modified_base (14)..(14): 2'-deoxy-2'-fluoroadenosine
  modified_base (15)..(15): 2'-O-methyladenosine
  modified_base (16)..(16): 2'-deoxy-2'-fluoroadenosine
  modified_base (17)..(17): 2'-O-methyladenosine
  modified_base (18)..(18): 2'-deoxy-2'-fluorocytidine
  modified_base (19)..(19): cm
  modified_base (20)..(20): 2'-deoxy-2'-fluorocytidine
  modified_base (21)..(21): 2'-O-methyladenosine
  modified_base (22)..(22): 2'-deoxy-2'-fluoroguanosine
  misc_feature (22)..(23): 5'-phosphonothioate
  modified_base (23)..(23): um
gcgccauucagauaaaacccagu

SEQ ID NO: 6342 - RNA, 23 nt, Artificial Sequence
  siRNA antisense strand against b2GPI
  modified_base (1)..(1): 2'-deoxy-2'-fluoroadenosine
  modified_base (2)..(2): gm
  misc_feature (2)..(3): 5'-phosphonothioate
  modified_base (3)..(3): 2'-deoxy-2'-fluorocytidine
  modified_base (4)..(4): gm
  modified_base (5)..(5): 2'-deoxy-2'-fluorocytidine
  modified_base (6)..(6): cm
  modified_base (7)..(7): 2'-deoxy-2'-fluoroadenosine
  modified_base (8)..(8): um
  modified_base (9)..(9): 2'-deoxy-2'-fluorouridine
  modified_base (10)..(10): cm
  modified_base (11)..(11): 2'-O-methyladenosine
  modified_base (12)..(12): 2'-deoxy-2'-fluoroguanosine
  modified_base (13)..(13): 2'-O-methyladenosine
  modified_base (14)..(14): 2'-deoxy-2'-fluorouridine
  modified_base (15)..(15): 2'-O-methyladenosine
  modified_base (16)..(16): 2'-deoxy-2'-fluoroadenosine
  modified_base (17)..(17): 2'-O-methyladenosine
  modified_base (18)..(18): 2'-deoxy-2'-fluoroadenosine
  modified_base (19)..(19): cm
  modified_base (20)..(20): 2'-deoxy-2'-fluorocytidine
  modified_base (21)..(21): cm
  modified_base (22)..(22): 2'-deoxy-2'-fluoroadenosine
  misc_feature (22)..(23): 5'-phosphonothioate
  modified_base (23)..(23): gm
agcgccauucagauaaaacccag

SEQ ID NO: 6343 - RNA, 23 nt, Artificial Sequence
  siRNA antisense strand against b2GPI
  modified_base (1)..(1): 2'-deoxy-2'-fluoroadenosine
  modified_base (2)..(2): um
  misc_feature (2)..(3): 5'-phosphonothioate
  modified_base (3)..(3): 2'-deoxy-2'-fluorocytidine
  modified_base (4)..(4): 2'-O-methyladenosine
  modified_base (5)..(5): 2'-deoxy-2'-fluoroguanosine
  modified_base (6)..(6): cm
  modified_base (7)..(7): 2'-deoxy-2'-fluoroguanosine
  modified_base (8)..(8): cm
  modified_base (9)..(9): 2'-deoxy-2'-fluorocytidine
  modified_base (10)..(10): 2'-O-methyladenosine
  modified_base (11)..(11): um
  modified_base (12)..(12): 2'-deoxy-2'-fluorouridine
  modified_base (13)..(13): cm
  modified_base (14)..(14): 2'-deoxy-2'-fluoroadenosine
  modified_base (15)..(15): gm
  modified_base (16)..(16): 2'-deoxy-2'-fluoroadenosine
  modified_base (17)..(17): um
  modified_base (18)..(18): 2'-deoxy-2'-fluoroadenosine
  modified_base (19)..(19): 2'-O-methyladenosine
  modified_base (20)..(20): 2'-deoxy-2'-fluoroadenosine
  modified_base (21)..(21): 2'-O-methyladenosine
  modified_base (22)..(22): 2'-deoxy-2'-fluorocytidine
  misc_feature (22)..(23): 5'-phosphonothioate
  modified_base (23)..(23): cm
aucagcgccauucagauaaaacc

SEQ ID NO: 6344 - RNA, 23 nt, Artificial Sequence
  siRNA antisense strand against b2GPI
  modified_base (1)..(1): 2'-deoxy-2'-fluoroadenosine
  modified_base (2)..(2): gm
  misc_feature (2)..(3): 5'-phosphonothioate
  modified_base (3)..(3): 2'-deoxy-2'-fluoroadenosine
  modified_base (4)..(4): 2'-O-methyladenosine
  modified_base (5)..(5): 2'-deoxy-2'-fluorouridine
  modified_base (6)..(6): cm
  modified_base (7)..(7): 2'-deoxy-2'-fluoroadenosine
  modified_base (8)..(8): gm
  modified_base (9)..(9): 2'-deoxy-2'-fluorocytidine
  modified_base (10)..(10): gm
  modified_base (11)..(11): cm
  modified_base (12)..(12): 2'-deoxy-2'-fluorocytidine
  modified_base (13)..(13): 2'-O-methyladenosine
  modified_base (14)..(14): 2'-deoxy-2'-fluorouridine
  modified_base (15)..(15): um
  modified_base (16)..(16): 2'-deoxy-2'-fluorocytidine
  modified_base (17)..(17): 2'-O-methyladenosine
  modified_base (18)..(18): 2'-deoxy-2'-fluoroguanosine
  modified_base (19)..(19): 2'-O-methyladenosine
  modified_base (20)..(20): 2'-deoxy-2'-fluorouridine
  modified_base (21)..(21): 2'-O-methyladenosine
  modified_base (22)..(22): 2'-deoxy-2'-fluoroadenosine
  misc_feature (22)..(23): 5'-phosphonothioate
  modified_base (23)..(23): 2'-O-methyladenosine
agaaucagcgccauucagauaaa

SEQ ID NO: 6345 - RNA, 23 nt, Artificial Sequence
  siRNA antisense strand against b2GPI
  modified_base (1)..(1): 2'-deoxy-2'-fluorouridine
  modified_base (2)..(2): gm
  misc_feature (2)..(3): 5'-phosphonothioate
  modified_base (3)..(3): 2'-deoxy-2'-fluoroguanosine
  modified_base (4)..(4): cm
  modified_base (5)..(5): 2'-deoxy-2'-fluoroadenosine
  modified_base (6)..(6): gm
  modified_base (7)..(7): 2'-deoxy-2'-fluoroadenosine
  modified_base (8)..(8): 2'-O-methyladenosine
  modified_base (9)..(9): 2'-deoxy-2'-fluorouridine
  modified_base (10)..(10): cm
  modified_base (11)..(11): 2'-O-methyladenosine
  modified_base (12)..(12): 2'-deoxy-2'-fluoroguanosine
  modified_base (13)..(13): cm
  modified_base (14)..(14): 2'-deoxy-2'-fluoroguanosine
  modified_base (15)..(15): cm
  modified_base (16)..(16): 2'-deoxy-2'-fluorocytidine
  modified_base (17)..(17): 2'-O-methyladenosine
  modified_base (18)..(18): 2'-deoxy-2'-fluorouridine
  modified_base (19)..(19): um
  modified_base (20)..(20): 2'-deoxy-2'-fluorocytidine
  modified_base (21)..(21): 2'-O-methyladenosine
  modified_base (22)..(22): 2'-deoxy-2'-fluoroguanosine
  misc_feature (22)..(23): 5'-phosphonothioate
  modified_base (23)..(23): 2'-O-methyladenosine
uggcagaaucagcgccauucaga

SEQ ID NO: 6346 - RNA, 23 nt, Artificial Sequence
  siRNA antisense strand against b2GPI
  modified_base (1)..(1): 2'-deoxy-2'-fluoroadenosine
  modified_base (2)..(2): cm
  misc_feature (2)..(3): 5'-phosphonothioate
  modified_base (3)..(3): 2'-deoxy-2'-fluorouridine
  modified_base (4)..(4): um
  modified_base (5)..(5): 2'-deoxy-2'-fluoroguanosine
  modified_base (6)..(6): gm
  modified_base (7)..(7): 2'-deoxy-2'-fluorocytidine
  modified_base (8)..(8): 2'-O-methyladenosine
  modified_base (9)..(9): 2'-deoxy-2'-fluoroguanosine
  modified_base (10)..(10): 2'-O-methyladenosine
  modified_base (11)..(11): 2'-O-methyladenosine
  modified_base (12)..(12): 2'-deoxy-2'-fluorouridine
  modified_base (13)..(13): cm
  modified_base (14)..(14): 2'-deoxy-2'-fluoroadenosine
  modified_base (15)..(15): gm
  modified_base (16)..(16): 2'-deoxy-2'-fluorocytidine
  modified_base (17)..(17): gm
  modified_base (18)..(18): 2'-deoxy-2'-fluorocytidine
  modified_base (19)..(19): cm
  modified_base (20)..(20): 2'-deoxy-2'-fluoroadenosine
  modified_base (21)..(21): um
  modified_base (22)..(22): 2'-deoxy-2'-fluorouridine
  misc_feature (22)..(23): 5'-phosphonothioate
  modified_base (23)..(23): cm
acuuggcagaaucagcgccauuc

SEQ ID NO: 6347 - RNA, 23 nt, Artificial Sequence
  siRNA antisense strand against b2GPI
  modified_base (1)..(1): 2'-deoxy-2'-fluorocytidine
  modified_base (2)..(2): 2'-O-methyladenosine
  misc_feature (2)..(3): 5'-phosphonothioate
  modified_base (3)..(3): 2'-deoxy-2'-fluorocytidine
  modified_base (4)..(4): um
  modified_base (5)..(5): 2'-deoxy-2'-fluorouridine
  modified_base (6)..(6): gm
  modified_base (7)..(7): 2'-deoxy-2'-fluoroguanosine
  modified_base (8)..(8): cm
  modified_base (9)..(9): 2'-deoxy-2'-fluoroadenosine
  modified_base (10)..(10): gm
  modified_base (11)..(11): 2'-O-methyladenosine
  modified_base (12)..(12): 2'-deoxy-2'-fluoroadenosine
  modified_base (13)..(13): um
  modified_base (14)..(14): 2'-deoxy-2'-fluorocytidine
  modified_base (15)..(15): 2'-O-methyladenosine
  modified_base (16)..(16): 2'-deoxy-2'-fluoroguanosine
  modified_base (17)..(17): cm
  modified_base (18)..(18): 2'-deoxy-2'-fluoroguanosine
  modified_base (19)..(19): cm
  modified_base (20)..(20): 2'-deoxy-2'-fluorocytidine
  modified_base (21)..(21): 2'-O-methyladenosine
  modified_base (22)..(22): 2'-deoxy-2'-fluorouridine
  misc_feature (22)..(23): 5'-phosphonothioate
  modified_base (23)..(23): um
cacuuggcagaaucagcgccauu

SEQ ID NO: 6348 - RNA, 23 nt, Artificial Sequence
  siRNA antisense strand against b2GPI
  modified_base (1)..(1): 2'-deoxy-2'-fluoroguanosine
  modified_base (2)..(2): cm
  misc_feature (2)..(3): 5'-phosphonothioate
  modified_base (3)..(3): 2'-deoxy-2'-fluoroadenosine
  modified_base (4)..(4): cm
  modified_base (5)..(5): 2'-deoxy-2'-fluorouridine
  modified_base (6)..(6): um
  modified_base (7)..(7): 2'-deoxy-2'-fluoroguanosine
  modified_base (8)..(8): gm
  modified_base (9)..(9): 2'-deoxy-2'-fluorocytidine
  modified_base (10)..(10): 2'-O-methyladenosine
  modified_base (11)..(11): gm
  modified_base (12)..(12): 2'-deoxy-2'-fluoroadenosine
  modified_base (13)..(13): 2'-O-methyladenosine
  modified_base (14)..(14): 2'-deoxy-2'-fluorouridine
  modified_base (15)..(15): cm
  modified_base (16)..(16): 2'-deoxy-2'-fluoroadenosine
  modified_base (17)..(17): gm
  modified_base (18)..(18): 2'-deoxy-2'-fluorocytidine
  modified_base (19)..(19): gm
  modified_base (20)..(20): 2'-deoxy-2'-fluorocytidine
  modified_base (21)..(21): cm
  modified_base (22)..(22): 2'-deoxy-2'-fluoroadenosine
  misc_feature (22)..(23): 5'-phosphonothioate
  modified_base (23)..(23): um
gcacuuggcagaaucagcgccau

SEQ ID NO: 6349 - RNA, 23 nt, Artificial Sequence
  siRNA antisense strand against b2GPI
  modified_base (1)..(1): 2'-deoxy-2'-fluorouridine
  modified_base (2)..(2): gm
  misc_feature (2)..(3): 5'-phosphonothioate
  modified_base (3)..(3): 2'-deoxy-2'-fluorocytidine
  modified_base (4)..(4): 2'-O-methyladenosine
  modified_base (5)..(5): 2'-deoxy-2'-fluorocytidine
  modified_base (6)..(6): um
  modified_base (7)..(7): 2'-deoxy-2'-fluorouridine
  modified_base (8)..(8): gm
  modified_base (9)..(9): 2'-deoxy-2'-fluoroguanosine
  modified_base (10)..(10): cm
  modified_base (11)..(11): 2'-O-methyladenosine
  modified_base (12)..(12): 2'-deoxy-2'-fluoroguanosine
  modified_base (13)..(13): 2'-O-methyladenosine
  modified_base (14)..(14): 2'-deoxy-2'-fluoroadenosine
  modified_base (15)..(15): um
  modified_base (16)..(16): 2'-deoxy-2'-fluorocytidine
  modified_base (17)..(17): 2'-O-methyladenosine
  modified_base (18)..(18): 2'-deoxy-2'-fluoroguanosine
  modified_base (19)..(19): cm
  modified_base (20)..(20): 2'-deoxy-2'-fluoroguanosine
  modified_base (21)..(21): cm
  modified_base (22)..(22): 2'-deoxy-2'-fluorocytidine
  misc_feature (22)..(23): 5'-phosphonothioate
  modified_base (23)..(23): 2'-O-methyladenosine
ugcacuuggcagaaucagcgcca

SEQ ID NO: 6350 - RNA, 23 nt, Artificial Sequence
  siRNA antisense strand against b2GPI
  modified_base (1)..(1): 2'-deoxy-2'-fluoroguanosine
  modified_base (2)..(2): um
  misc_feature (2)..(3): 5'-phosphonothioate
  modified_base (3)..(3): 2'-deoxy-2'-fluoroguanosine
  modified_base (4)..(4): cm
  modified_base (5)..(5): 2'-deoxy-2'-fluoroadenosine
  modified_base (6)..(6): cm
  modified_base (7)..(7): 2'-deoxy-2'-fluorouridine
  modified_base (8)..(8): um
  modified_base (9)..(9): 2'-deoxy-2'-fluoroguanosine
  modified_base (10)..(10): gm
  modified_base (11)..(11): cm
  modified_base (12)..(12): 2'-deoxy-2'-fluoroadenosine
  modified_base (13)..(13): gm
  modified_base (14)..(14): 2'-deoxy-2'-fluoroadenosine
  modified_base (15)..(15): 2'-O-methyladenosine
  modified_base (16)..(16): 2'-deoxy-2'-fluorouridine
  modified_base (17)..(17): cm
  modified_base (18)..(18): 2'-deoxy-2'-fluoroadenosine
  modified_base (19)..(19): gm
  modified_base (20)..(20): 2'-deoxy-2'-fluorocytidine
  modified_base (21)..(21): gm
  modified_base (22)..(22): 2'-deoxy-2'-fluorocytidine
  misc_feature (22)..(23): 5'-phosphonothioate
  modified_base (23)..(23): cm
gugcacuuggcagaaucagcgcc

SEQ ID NO: 6351 - RNA, 23 nt, Artificial Sequence
  siRNA antisense strand against b2GPI
  modified_base (1)..(1): 2'-deoxy-2'-fluoroadenosine
  modified_base (2)..(2): gm
  misc_feature (2)..(3): 5'-phosphonothioate
  modified_base (3)..(3): 2'-deoxy-2'-fluorouridine
  modified_base (4)..(4): gm
  modified_base (5)..(5): 2'-deoxy-2'-fluorocytidine
  modified_base (6)..(6): 2'-O-methyladenosine
  modified_base (7)..(7): 2'-deoxy-2'-fluorocytidine
  modified_base (8)..(8): um
  modified_base (9)..(9): 2'-deoxy-2'-fluorouridine
  modified_base (10)..(10): gm
  modified_base (11)..(11): gm
  modified_base (12)..(12): 2'-deoxy-2'-fluorocytidine
  modified_base (13)..(13): 2'-O-methyladenosine
  modified_base (14)..(14): 2'-deoxy-2'-fluoroguanosine
  modified_base (15)..(15): 2'-O-methyladenosine
  modified_base (16)..(16): 2'-deoxy-2'-fluoroadenosine
  modified_base (17)..(17): um
  modified_base (18)..(18): 2'-deoxy-2'-fluorocytidine
  modified_base (19)..(19): 2'-O-methyladenosine
  modified_base (20)..(20): 2'-deoxy-2'-fluoroguanosine
  modified_base (21)..(21): cm
  modified_base (22)..(22): 2'-deoxy-2'-fluoroguanosine
  misc_feature (22)..(23): 5'-phosphonothioate
  modified_base (23)..(23): cm
agugcacuuggcagaaucagcgc

SEQ ID NO: 6352 - RNA, 23 nt, Artificial Sequence
  siRNA antisense strand against b2GPI
  modified_base (1)..(1): 2'-deoxy-2'-fluorocytidine
  modified_base (2)..(2): 2'-O-methyladenosine
  misc_feature (2)..(3): 5'-phosphonothioate
  modified_base (3)..(3): 2'-deoxy-2'-fluoroguanosine
  modified_base (4)..(4): um
  modified_base (5)..(5): 2'-deoxy-2'-fluoroguanosine
  modified_base (6)..(6): cm
  modified_base (7)..(7): 2'-deoxy-2'-fluoroadenosine
  modified_base (8)..(8): cm
  modified_base (9)..(9): 2'-deoxy-2'-fluorouridine
  modified_base (10)..(10): um
  modified_base (11)..(11): gm
  modified_base (12)..(12): 2'-deoxy-2'-fluoroguanosine
  modified_base (13)..(13): cm
  modified_base (14)..(14): 2'-deoxy-2'-fluoroadenosine
  modified_base (15)..(15): gm
  modified_base (16)..(16): 2'-deoxy-2'-fluoroadenosine
  modified_base (17)..(17): 2'-O-methyladenosine
  modified_base (18)..(18): 2'-deoxy-2'-fluorouridine
  modified_base (19)..(19): cm
  modified_base (20)..(20): 2'-deoxy-2'-fluoroadenosine
  modified_base (21)..(21): gm
  modified_base (22)..(22): 2'-deoxy-2'-fluorocytidine
  misc_feature (22)..(23): 5'-phosphonothioate
  modified_base (23)..(23): gm
cagugcacuuggcagaaucagcg

SEQ ID NO: 6353 - RNA, 23 nt, Artificial Sequence
  siRNA antisense strand against b2GPI
  modified_base (1)..(1): 2'-deoxy-2'-fluorouridine
  modified_base (2)..(2): cm
  misc_feature (2)..(3): 5'-phosphonothioate
  modified_base (3)..(3): 2'-deoxy-2'-fluorocytidine
  modified_base (4)..(4): um
  modified_base (5)..(5): 2'-deoxy-2'-fluorocytidine
  modified_base (6)..(6): 2'-O-methyladenosine
  modified_base (7)..(7): 2'-deoxy-2'-fluoroguanosine
  modified_base (8)..(8): um
  modified_base (9)..(9): 2'-deoxy-2'-fluoroguanosine
  modified_base (10)..(10): cm
  modified_base (11)..(11): 2'-O-methyladenosine
  modified_base (12)..(12): 2'-deoxy-2'-fluorocytidine
  modified_base (13)..(13): um
  modified_base (14)..(14): 2'-deoxy-2'-fluorouridine
  modified_base (15)..(15): gm
  modified_base (16)..(16): 2'-deoxy-2'-fluoroguanosine
  modified_base (17)..(17): cm
  modified_base (18)..(18): 2'-deoxy-2'-fluoroadenosine
  modified_base (19)..(19): gm
  modified_base (20)..(20): 2'-deoxy-2'-fluoroadenosine
  modified_base (21)..(21): 2'-O-methyladenosine
  modified_base (22)..(22): 2'-deoxy-2'-fluorouridine
  misc_feature (22)..(23): 5'-phosphonothioate
  modified_base (23)..(23): cm
uccucagugcacuuggcagaauc

SEQ ID NO: 6354 - RNA, 23 nt, Artificial Sequence
  siRNA antisense strand against b2GPI
  modified_base (1)..(1): 2'-deoxy-2'-fluorouridine
  modified_base (2)..(2): um
  misc_feature (2)..(3): 5'-phosphonothioate
  modified_base (3)..(3): 2'-deoxy-2'-fluorocytidine
  modified_base (4)..(4): cm
  modified_base (5)..(5): 2'-deoxy-2'-fluorouridine
  modified_base (6)..(6): cm
  modified_base (7)..(7): 2'-deoxy-2'-fluoroadenosine
  modified_base (8)..(8): gm
  modified_base (9)..(9): 2'-deoxy-2'-fluorouridine
  modified_base (10)..(10): gm
  modified_base (11)..(11): cm
  modified_base (12)..(12): 2'-deoxy-2'-fluoroadenosine
  modified_base (13)..(13): cm
  modified_base (14)..(14): 2'-deoxy-2'-fluorouridine
  modified_base (15)..(15): um
  modified_base (16)..(16): 2'-deoxy-2'-fluoroguanosine
  modified_base (17)..(17): gm
  modified_base (18)..(18): 2'-deoxy-2'-fluorocytidine
  modified_base (19)..(19): 2'-O-methyladenosine
  modified_base (20)..(20): 2'-deoxy-2'-fluoroguanosine
  modified_base (21)..(21): 2'-O-methyladenosine
  modified_base (22)..(22): 2'-deoxy-2'-fluoroadenosine
  misc_feature (22)..(23): 5'-phosphonothioate
  modified_base (23)..(23): um
uuccucagugcacuuggcagaau

SEQ ID NO: 6355 - RNA, 23 nt, Artificial Sequence
  siRNA antisense strand against b2GPI
  modified_base (1)..(1): 2'-deoxy-2'-fluorocytidine
  modified_base (2)..(2): cm
  misc_feature (2)..(3): 5'-phosphonothioate
  modified_base (3)..(3): 2'-deoxy-2'-fluorouridine
  modified_base (4)..(4): um
  modified_base (5)..(5): 2'-deoxy-2'-fluorocytidine
  modified_base (6)..(6): cm
  modified_base (7)..(7): 2'-deoxy-2'-fluorouridine
  modified_base (8)..(8): cm
  modified_base (9)..(9): 2'-deoxy-2'-fluoroadenosine
  modified_base (10)..(10): gm
  modified_base (11)..(11): um
  modified_base (12)..(12): 2'-deoxy-2'-fluoroguanosine
  modified_base (13)..(13): cm
  modified_base (14)..(14): 2'-deoxy-2'-fluoroadenosine
  modified_base (15)..(15): cm
  modified_base (16)..(16): 2'-deoxy-2'-fluorouridine
  modified_base (17)..(17): um
  modified_base (18)..(18): 2'-deoxy-2'-fluoroguanosine
  modified_base (19)..(19): gm
  modified_base (20)..(20): 2'-deoxy-2'-fluorocytidine
  modified_base (21)..(21): 2'-O-methyladenosine
  modified_base (22)..(22): 2'-deoxy-2'-fluoroguanosine
  misc_feature (22)..(23): 5'-phosphonothioate
  modified_base (23)..(23): 2'-O-methyladenosine
ccuuccucagugcacuuggcaga

SEQ ID NO: 6356 - RNA, 23 nt, Artificial Sequence
  siRNA antisense strand against b2GPI
  modified_base (1)..(1): 2'-deoxy-2'-fluorouridine
  modified_base (2)..(2): cm
  misc_feature (2)..(3): 5'-phosphonothioate
  modified_base (3)..(3): 2'-deoxy-2'-fluorocytidine
  modified_base (4)..(4): um
  modified_base (5)..(5): 2'-deoxy-2'-fluorouridine
  modified_base (6)..(6): cm
  modified_base (7)..(7): 2'-deoxy-2'-fluorocytidine
  modified_base (8)..(8): um
  modified_base (9)..(9): 2'-deoxy-2'-fluorocytidine
  modified_base (10)..(10): 2'-O-methyladenosine
  modified_base (11)..(11): gm
  modified_base (12)..(12): 2'-deoxy-2'-fluorouridine
  modified_base (13)..(13): gm
  modified_base (14)..(14): 2'-deoxy-2'-fluorocytidine
  modified_base (15)..(15): 2'-O-methyladenosine
  modified_base (16)..(16): 2'-deoxy-2'-fluorocytidine
  modified_base (17)..(17): um
  modified_base (18)..(18): 2'-deoxy-2'-fluorouridine
  modified_base (19)..(19): gm
  modified_base (20)..(20): 2'-deoxy-2'-fluoroguanosine
  modified_base (21)..(21): cm
  modified_base (22)..(22): 2'-deoxy-2'-fluoroadenosine
  misc_feature (22)..(23): 5'-phosphonothioate
  modified_base (23)..(23): gm
uccuuccucagugcacuuggcag

SEQ ID NO: 6357 - RNA, 23 nt, Artificial Sequence
  siRNA antisense strand against b2GPI
  modified_base (1)..(1): 2'-deoxy-2'-fluorouridine
  modified_base (2)..(2): um
  misc_feature (2)..(3): 5'-phosphonothioate
  modified_base (3)..(3): 2'-deoxy-2'-fluorocytidine
  modified_base (4)..(4): cm
  modified_base (5)..(5): 2'-deoxy-2'-fluorouridine
  modified_base (6)..(6): um
  modified_base (7)..(7): 2'-deoxy-2'-fluorocytidine
  modified_base (8)..(8): cm
  modified_base (9)..(9): 2'-deoxy-2'-fluorouridine
  modified_base (10)..(10): cm
  modified_base (11)..(11): 2'-O-methyladenosine
  modified_base (12)..(12): 2'-deoxy-2'-fluoroguanosine
  modified_base (13)..(13): um
  modified_base (14)..(14): 2'-deoxy-2'-fluoroguanosine
  modified_base (15)..(15): cm
  modified_base (16)..(16): 2'-deoxy-2'-fluoroadenosine
  modified_base (17)..(17): cm
  modified_base (18)..(18): 2'-deoxy-2'-fluorouridine
  modified_base (19)..(19): um
  modified_base (20)..(20): 2'-deoxy-2'-fluoroguanosine
  modified_base (21)..(21): gm
  modified_base (22)..(22): 2'-deoxy-2'-fluorocytidine
  misc_feature (22)..(23): 5'-phosphonothioate
  modified_base (23)..(23): 2'-O-methyladenosine
uuccuuccucagugcacuuggca

SEQ ID NO: 6358 - RNA, 23 nt, Artificial Sequence
  siRNA antisense strand against b2GPI
  modified_base (1)..(1): 2'-deoxy-2'-fluorouridine
  modified_base (2)..(2): um
  misc_feature (2)..(3): 5'-phosphonothioate
  modified_base (3)..(3): 2'-deoxy-2'-fluorouridine
  modified_base (4)..(4): cm
  modified_base (5)..(5): 2'-deoxy-2'-fluorocytidine
  modified_base (6)..(6): um
  modified_base (7)..(7): 2'-deoxy-2'-fluorouridine
  modified_base (8)..(8): cm
  modified_base (9)..(9): 2'-deoxy-2'-fluorocytidine
  modified_base (10)..(10): um
  modified_base (11)..(11): cm
  modified_base (12)..(12): 2'-deoxy-2'-fluoroadenosine
  modified_base (13)..(13): gm
  modified_base (14)..(14): 2'-deoxy-2'-fluorouridine
  modified_base (15)..(15): gm
  modified_base (16)..(16): 2'-deoxy-2'-fluorocytidine
  modified_base (17)..(17): 2'-O-methyladenosine
  modified_base (18)..(18): 2'-deoxy-2'-fluorocytidine
  modified_base (19)..(19): um
  modified_base (20)..(20): 2'-deoxy-2'-fluorouridine
  modified_base (21)..(21): gm
  modified_base (22)..(22): 2'-deoxy-2'-fluoroguanosine
  misc_feature (22)..(23): 5'-phosphonothioate
  modified_base (23)..(23): cm
uuuccuuccucagugcacuuggc

SEQ ID NO: 6359 - RNA, 23 nt, Artificial Sequence
  siRNA antisense strand against b2GPI
  modified_base (1)..(1): 2'-deoxy-2'-fluorouridine
  modified_base (2)..(2): um
  misc_feature (2)..(3): 5'-phosphonothioate
  modified_base (3)..(3): 2'-deoxy-2'-fluorouridine
  modified_base (4)..(4): um
  modified_base (5)..(5): 2'-deoxy-2'-fluorocytidine
  modified_base (6)..(6): cm
  modified_base (7)..(7): 2'-deoxy-2'-fluorouridine
  modified_base (8)..(8): um
  modified_base (9)..(9): 2'-deoxy-2'-fluorocytidine
  modified_base (10)..(10): cm
  modified_base (11)..(11): um
  modified_base (12)..(12): 2'-deoxy-2'-fluorocytidine
  modified_base (13)..(13): 2'-O-methyladenosine
  modified_base (14)..(14): 2'-deoxy-2'-fluoroguanosine
  modified_base (15)..(15): um
  modified_base (16)..(16): 2'-deoxy-2'-fluoroguanosine
  modified_base (17)..(17): cm
  modified_base (18)..(18): 2'-deoxy-2'-fluoroadenosine
  modified_base (19)..(19): cm
  modified_base (20)..(20): 2'-deoxy-2'-fluorouridine
  modified_base (21)..(21): um
  modified_base (22)..(22): 2'-deoxy-2'-fluoroguanosine
  misc_feature (22)..(23): 5'-phosphonothioate
  modified_base (23)..(23): gm
uuuuccuuccucagugcacuugg

SEQ ID NO: 6360 - RNA, 23 nt, Artificial Sequence
  siRNA antisense strand against b2GPI
  modified_base (1)..(1): 2'-deoxy-2'-fluoroadenosine
  modified_base (2)..(2): um
  misc_feature (2)..(3): 5'-phosphonothioate
  modified_base (3)..(3): 2'-deoxy-2'-fluorouridine
  modified_base (4)..(4): um
  modified_base (5)..(5): 2'-deoxy-2'-fluorouridine
  modified_base (6)..(6): cm
  modified_base (7)..(7): 2'-deoxy-2'-fluorocytidine
  modified_base (8)..(8): um
  modified_base (9)..(9): 2'-deoxy-2'-fluorouridine
  modified_base (10)..(10): cm
  modified_base (11)..(11): cm
  modified_base (12)..(12): 2'-deoxy-2'-fluorouridine
  modified_base (13)..(13): cm
  modified_base (14)..(14): 2'-deoxy-2'-fluoroadenosine
  modified_base (15)..(15): gm
  modified_base (16)..(16): 2'-deoxy-2'-fluorouridine
  modified_base (17)..(17): gm
  modified_base (18)..(18): 2'-deoxy-2'-fluorocytidine
  modified_base (19)..(19): 2'-O-methyladenosine
  modified_base (20)..(20): 2'-deoxy-2'-fluorocytidine
  modified_base (21)..(21): um
  modified_base (22)..(22): 2'-deoxy-2'-fluorouridine
  misc_feature (22)..(23): 5'-phosphonothioate
  modified_base (23)..(23): gm
auuuuccuuccucagugcacuug

SEQ ID NO: 6361 - RNA, 23 nt, Artificial Sequence
  siRNA antisense strand against b2GPI
  modified_base (1)..(1): 2'-deoxy-2'-fluorocytidine
  modified_base (2)..(2): cm
  misc_feature (2)..(3): 5'-phosphonothioate
  modified_base (3)..(3): 2'-deoxy-2'-fluoroguanosine
  modified_base (4)..(4): gm
  modified_base (5)..(5): 2'-deoxy-2'-fluoroguanosine
  modified_base (6)..(6): cm
  modified_base (7)..(7): 2'-deoxy-2'-fluorouridine
  modified_base (8)..(8): cm
  modified_base (9)..(9): 2'-deoxy-2'-fluorocytidine
  modified_base (10)..(10): 2'-O-methyladenosine
  modified_base (11)..(11): um
  modified_base (12)..(12): 2'-deoxy-2'-fluorouridine
  modified_base (13)..(13): um
  modified_base (14)..(14): 2'-deoxy-2'-fluorouridine
  modified_base (15)..(15): cm
  modified_base (16)..(16): 2'-deoxy-2'-fluorocytidine
  modified_base (17)..(17): um
  modified_base (18)..(18): 2'-deoxy-2'-fluorouridine
  modified_base (19)..(19): cm
  modified_base (20)..(20): 2'-deoxy-2'-fluorocytidine
  modified_base (21)..(21): um
  modified_base (22)..(22): 2'-deoxy-2'-fluorocytidine
  misc_feature (22)..(23): 5'-phosphonothioate
  modified_base (23)..(23): 2'-O-methyladenosine
ccgggcuccauuuuccuuccuca

SEQ ID NO: 6362 - RNA, 23 nt, Artificial Sequence
  siRNA antisense strand against b2GPI
  modified_base (1)..(1): 2'-deoxy-2'-fluorocytidine
  modified_base (2)..(2): 2'-O-methyladenosine
  misc_feature (2)..(3): 5'-phosphonothioate
  modified_base (3)..(3): 2'-deoxy-2'-fluoroguanosine
  modified_base (4)..(4): 2'-O-methyladenosine
  modified_base (5)..(5): 2'-deoxy-2'-fluorocytidine
  modified_base (6)..(6): 2'-O-methyladenosine
  modified_base (7)..(7): 2'-deoxy-2'-fluoroguanosine
  modified_base (8)..(8): gm
  modified_base (9)..(9): 2'-deoxy-2'-fluoroadenosine
  modified_base (10)..(10): 2'-O-methyladenosine
  modified_base (11)..(11): gm
  modified_base (12)..(12): 2'-deoxy-2'-fluorocytidine
  modified_base (13)..(13): um
  modified_base (14)..(14): 2'-deoxy-2'-fluorocytidine
  modified_base (15)..(15): cm
  modified_base (16)..(16): 2'-deoxy-2'-fluoroguanosine
  modified_base (17)..(17): gm
  modified_base (18)..(18): 2'-deoxy-2'-fluoroguanosine
  modified_base (19)..(19): cm
  modified_base (20)..(20): 2'-deoxy-2'-fluorouridine
  modified_base (21)..(21): cm
  modified_base (22)..(22): 2'-deoxy-2'-fluorocytidine
  misc_feature (22)..(23): 5'-phosphonothioate
  modified_base (23)..(23): 2'-O-methyladenosine
cagacaggaagcuccgggcucca

SEQ ID NO: 6363 - RNA, 23 nt, Artificial Sequence
  siRNA antisense strand against b2GPI
  modified_base (1)..(1): 2'-deoxy-2'-fluoroadenosine
  modified_base (2)..(2): cm
  misc_feature (2)..(3): 5'-phosphonothioate
  modified_base (3)..(3): 2'-deoxy-2'-fluoroadenosine
  modified_base (4)..(4): gm
  modified_base (5)..(5): 2'-deoxy-2'-fluoroadenosine
  modified_base (6)..(6): cm
  modified_base (7)..(7): 2'-deoxy-2'-fluoroadenosine
  modified_base (8)..(8): gm
  modified_base (9)..(9): 2'-deoxy-2'-fluoroguanosine
  modified_base (10)..(10): 2'-O-methyladenosine
  modified_base (11)..(11): 2'-O-methyladenosine
  modified_base (12)..(12): 2'-deoxy-2'-fluoroguanosine
  modified_base (13)..(13): cm
  modified_base (14)..(14): 2'-deoxy-2'-fluorouridine
  modified_base (15)..(15): cm
  modified_base (16)..(16): 2'-deoxy-2'-fluorocytidine
  modified_base (17)..(17): gm
  modified_base (18)..(18): 2'-deoxy-2'-fluoroguanosine
  modified_base (19)..(19): gm
  modified_base (20)..(20): 2'-deoxy-2'-fluorocytidine
  modified_base (21)..(21): um
  modified_base (22)..(22): 2'-deoxy-2'-fluorocytidine
  misc_feature (22)..(23): 5'-phosphonothioate
  modified_base (23)..(23): cm
acagacaggaagcuccgggcucc

SEQ ID NO: 6364 - RNA, 23 nt, Artificial Sequence
  siRNA antisense strand against b2GPI
  modified_base (1)..(1): 2'-deoxy-2'-fluoroadenosine
  modified_base (2)..(2): gm
  misc_feature (2)..(3): 5'-phosphonothioate
  modified_base (3)..(3): 2'-deoxy-2'-fluorocytidine
  modified_base (4)..(4): 2'-O-methyladenosine
  modified_base (5)..(5): 2'-deoxy-2'-fluorocytidine
  modified_base (6)..(6): 2'-O-methyladenosine
  modified_base (7)..(7): 2'-deoxy-2'-fluoroguanosine
  modified_base (8)..(8): 2'-O-methyladenosine
  modified_base (9)..(9): 2'-deoxy-2'-fluorocytidine
  modified_base (10)..(10): 2'-O-methyladenosine
  modified_base (11)..(11): gm
  modified_base (12)..(12): 2'-deoxy-2'-fluoroguanosine
  modified_base (13)..(13): 2'-O-methyladenosine
  modified_base (14)..(14): 2'-deoxy-2'-fluoroadenosine
  modified_base (15)..(15): gm
  modified_base (16)..(16): 2'-deoxy-2'-fluorocytidine
  modified_base (17)..(17): um
  modified_base (18)..(18): 2'-deoxy-2'-fluorocytidine
  modified_base (19)..(19): cm
  modified_base (20)..(20): 2'-deoxy-2'-fluoroguanosine
  modified_base (21)..(21): gm
  modified_base (22)..(22): 2'-deoxy-2'-fluoroguanosine
  misc_feature (22)..(23): 5'-phosphonothioate
  modified_base (23)..(23): cm
agcacagacaggaagcuccgggc

SEQ ID NO: 6365 - RNA, 23 nt, Artificial Sequence
  siRNA antisense strand against b2GPI
  modified_base (1)..(1): 2'-deoxy-2'-fluoroguanosine
  modified_base (2)..(2): 2'-O-methyladenosine
  misc_feature (2)..(3): 5'-phosphonothioate
  modified_base (3)..(3): 2'-deoxy-2'-fluoroguanosine
  modified_base (4)..(4): cm
  modified_base (5)..(5): 2'-deoxy-2'-fluoroadenosine
  modified_base (6)..(6): cm
  modified_base (7)..(7): 2'-deoxy-2'-fluoroadenosine
  modified_base (8)..(8): gm
  modified_base (9)..(9): 2'-deoxy-2'-fluoroadenosine
  modified_base (10)..(10): cm
  modified_base (11)..(11): 2'-O-methyladenosine
  modified_base (12)..(12): 2'-deoxy-2'-fluoroguanosine
  modified_base (13)..(13): gm
  modified_base (14)..(14): 2'-deoxy-2'-fluoroadenosine
  modified_base (15)..(15): 2'-O-methyladenosine
  modified_base (16)..(16): 2'-deoxy-2'-fluoroguanosine
  modified_base (17)..(17): cm
  modified_base (18)..(18): 2'-deoxy-2'-fluorouridine
  modified_base (19)..(19): cm
  modified_base (20)..(20): 2'-deoxy-2'-fluorocytidine
  modified_base (21)..(21): gm
  modified_base (22)..(22): 2'-deoxy-2'-fluoroguanosine
  misc_feature (22)..(23): 5'-phosphonothioate
  modified_base (23)..(23): gm
gagcacagacaggaagcuccggg

SEQ ID NO: 6366 - RNA, 23 nt, Artificial Sequence
  siRNA antisense strand against b2GPI
  modified_base (1)..(1): 2'-deoxy-2'-fluorouridine
  modified_base (2)..(2): gm
  misc_feature (2)..(3): 5'-phosphonothioate
  modified_base (3)..(3): 2'-deoxy-2'-fluoroguanosine
  modified_base (4)..(4): gm
  modified_base (5)..(5): 2'-deoxy-2'-fluoroadenosine
  modified_base (6)..(6): gm
  modified_base (7)..(7): 2'-deoxy-2'-fluorocytidine
  modified_base (8)..(8): 2'-O-methyladenosine
  modified_base (9)..(9): 2'-deoxy-2'-fluorocytidine
  modified_base (10)..(10): 2'-O-methyladenosine
  modified_base (11)..(11): gm
  modified_base (12)..(12): 2'-deoxy-2'-fluoroadenosine
  modified_base (13)..(13): cm
  modified_base (14)..(14): 2'-deoxy-2'-fluoroadenosine
  modified_base (15)..(15): gm
  modified_base (16)..(16): 2'-deoxy-2'-fluoroguanosine
  modified_base (17)..(17): 2'-O-methyladenosine
  modified_base (18)..(18): 2'-deoxy-2'-fluoroadenosine
  modified_base (19)..(19): gm
  modified_base (20)..(20): 2'-deoxy-2'-fluorocytidine
  modified_base (21)..(21): um
  modified_base (22)..(22): 2'-deoxy-2'-fluorocytidine
  misc_feature (22)..(23): 5'-phosphonothioate
  modified_base (23)..(23): cm
ugggagcacagacaggaagcucc

SEQ ID NO: 6367 - RNA, 23 nt, Artificial Sequence
  siRNA antisense strand against b2GPI
  modified_base (1)..(1): 2'-deoxy-2'-fluoroadenosine
  modified_base (2)..(2): um
  misc_feature (2)..(3): 5'-phosphonothioate
  modified_base (3)..(3): 2'-deoxy-2'-fluoroguanosine
  modified_base (4)..(4): 2'-O-methyladenosine
  modified_base (5)..(5): 2'-deoxy-2'-fluorouridine
  modified_base (6)..(6): gm
  modified_base (7)..(7): 2'-deoxy-2'-fluoroguanosine
  modified_base (8)..(8): gm
  modified_base (9)..(9): 2'-deoxy-2'-fluoroadenosine
  modified_base (10)..(10): gm
  modified_base (11)..(11): cm
  modified_base (12)..(12): 2'-deoxy-2'-fluoroadenosine
  modified_base (13)..(13): cm
  modified_base (14)..(14): 2'-deoxy-2'-fluoroadenosine
  modified_base (15)..(15): gm
  modified_base (16)..(16): 2'-deoxy-2'-fluoroadenosine
  modified_base (17)..(17): cm
  modified_base (18)..(18): 2'-deoxy-2'-fluoroadenosine
  modified_base (19)..(19): gm
  modified_base (20)..(20): 2'-deoxy-2'-fluoroguanosine
  modified_base (21)..(21): 2'-O-methyladenosine
  modified_base (22)..(22): 2'-deoxy-2'-fluoroadenosine
  misc_feature (22)..(23): 5'-phosphonothioate
  modified_base (23)..(23): gm
augaugggagcacagacaggaag

SEQ ID NO: 6368 - RNA, 23 nt, Artificial Sequence
  siRNA antisense strand against b2GPI
  modified_base (1)..(1): 2'-deoxy-2'-fluoroadenosine
  modified_base (2)..(2): gm
  misc_feature (2)..(3): 5'-phosphonothioate
  modified_base (3)..(3): 2'-deoxy-2'-fluoroadenosine
  modified_base (4)..(4): um
  modified_base (5)..(5): 2'-deoxy-2'-fluoroguanosine
  modified_base (6)..(6): 2'-O-methyladenosine
  modified_base (7)..(7): 2'-deoxy-2'-fluorouridine
  modified_base (8)..(8): gm
  modified_base (9)..(9): 2'-deoxy-2'-fluoroguanosine
  modified_base (10)..(10): gm
  modified_base (11)..(11): 2'-O-methyladenosine
  modified_base (12)..(12): 2'-deoxy-2'-fluoroguanosine
  modified_base (13)..(13): cm
  modified_base (14)..(14): 2'-deoxy-2'-fluoroadenosine
  modified_base (15)..(15): cm
  modified_base (16)..(16): 2'-deoxy-2'-fluoroadenosine
  modified_base (17)..(17): gm
  modified_base (18)..(18): 2'-deoxy-2'-fluoroadenosine
  modified_base (19)..(19): cm
  modified_base (20)..(20): 2'-deoxy-2'-fluoroadenosine
  modified_base (21)..(21): gm
  modified_base (22)..(22): 2'-deoxy-2'-fluoroguanosine
  misc_feature (22)..(23): 5'-phosphonothioate
  modified_base (23)..(23): 2'-O-methyladenosine
agaugaugggagcacagacagga

SEQ ID NO: 6369 - RNA, 23 nt, Artificial Sequence
  siRNA antisense strand against b2GPI
  modified_base (1)..(1): 2'-deoxy-2'-fluoroguanosine
  modified_base (2)..(2): um
  misc_feature (2)..(3): 5'-phosphonothioate
  modified_base (3)..(3): 2'-deoxy-2'-fluoroguanosine
  modified_base (4)..(4): gm
  modified_base (5)..(5): 2'-deoxy-2'-fluoroadenosine
  modified_base (6)..(6): gm
  modified_base (7)..(7): 2'-deoxy-2'-fluoroguanosine
  modified_base (8)..(8): gm
  modified_base (9)..(9): 2'-deoxy-2'-fluorocytidine
  modified_base (10)..(10): 2'-O-methyladenosine
  modified_base (11)..(11): gm
  modified_base (12)..(12): 2'-deoxy-2'-fluoroadenosine
  modified_base (13)..(13): um
  modified_base (14)..(14): 2'-deoxy-2'-fluoroguanosine
  modified_base (15)..(15): 2'-O-methyladenosine
  modified_base (16)..(16): 2'-deoxy-2'-fluorouridine
  modified_base (17)..(17): gm
  modified_base (18)..(18): 2'-deoxy-2'-fluoroguanosine
  modified_base (19)..(19): gm
  modified_base (20)..(20): 2'-deoxy-2'-fluoroadenosine
  modified_base (21)..(21): gm
  modified_base (22)..(22): 2'-deoxy-2'-fluorocytidine
  misc_feature (22)..(23): 5'-phosphonothioate
  modified_base (23)..(23): 2'-O-methyladenosine
guggagggcagaugaugggagca

SEQ ID NO: 6370 - RNA, 23 nt, Artificial Sequence
  siRNA antisense strand against b2GPI
  modified_base (1)..(1): 2'-deoxy-2'-fluoroadenosine
  modified_base (2)..(2): um
  misc_feature (2)..(3): 5'-phosphonothioate
  modified_base (3)..(3): 2'-deoxy-2'-fluoroguanosine
  modified_base (4)..(4): gm
  modified_base (5)..(5): 2'-deoxy-2'-fluorouridine
  modified_base (6)..(6): gm
  modified_base (7)..(7): 2'-deoxy-2'-fluoroguanosine
  modified_base (8)..(8): 2'-O-methyladenosine
  modified_base (9)..(9): 2'-deoxy-2'-fluoroguanosine
  modified_base (10)..(10): gm
  modified_base (11)..(11): gm
  modified_base (12)..(12): 2'-deoxy-2'-fluorocytidine
  modified_base (13)..(13): 2'-O-methyladenosine
  modified_base (14)..(14): 2'-deoxy-2'-fluoroguanosine
  modified_base (15)..(15): 2'-O-methyladenosine
  modified_base (16)..(16): 2'-deoxy-2'-fluorouridine
  modified_base (17)..(17): gm
  modified_base (18)..(18): 2'-deoxy-2'-fluoroadenosine
  modified_base (19)..(19): um
  modified_base (20)..(20): 2'-deoxy-2'-fluoroguanosine
  modified_base (21)..(21): gm
  modified_base (22)..(22): 2'-deoxy-2'-fluoroguanosine
  misc_feature (22)..(23): 5'-phosphonothioate
  modified_base (23)..(23): 2'-O-methyladenosine
augguggagggcagaugauggga

SEQ ID NO: 6371 - RNA, 23 nt, Artificial Sequence
  siRNA antisense strand against b2GPI
  modified_base (1)..(1): 2'-deoxy-2'-fluoroguanosine
  modified_base (2)..(2): 2'-O-methyladenosine
  misc_feature (2)..(3): 5'-phosphonothioate
  modified_base (3)..(3): 2'-deoxy-2'-fluorouridine
  modified_base (4)..(4): gm
  modified_base (5)..(5): 2'-deoxy-2'-fluoroguanosine
  modified_base (6)..(6): um
  modified_base (7)..(7): 2'-deoxy-2'-fluoroguanosine
  modified_base (8)..(8): gm
  modified_base (9)..(9): 2'-deoxy-2'-fluoroadenosine
  modified_base (10)..(10): gm
  modified_base (11)..(11): gm
  modified_base (12)..(12): 2'-deoxy-2'-fluoroguanosine
  modified_base (13)..(13): cm
  modified_base (14)..(14): 2'-deoxy-2'-fluoroadenosine
  modified_base (15)..(15): gm
  modified_base (16)..(16): 2'-deoxy-2'-fluoroadenosine
  modified_base (17)..(17): um
  modified_base (18)..(18): 2'-deoxy-2'-fluoroguanosine
  modified_base (19)..(19): 2'-O-methyladenosine
  modified_base (20)..(20): 2'-deoxy-2'-fluorouridine
  modified_base (21)..(21): gm
  modified_base (22)..(22): 2'-deoxy-2'-fluoroguanosine
  misc_feature (22)..(23): 5'-phosphonothioate
  modified_base (23)..(23): gm
gaugguggagggcagaugauggg

SEQ ID NO: 6372 - RNA, 23 nt, Artificial Sequence
  siRNA antisense strand against b2GPI
  modified_base (1)..(1): 2'-deoxy-2'-fluorouridine
  modified_base (2)..(2): 2'-O-methyladenosine
  misc_feature (2)..(3): 5'-phosphonothioate
  modified_base (3)..(3): 2'-deoxy-2'-fluorouridine
  modified_base (4)..(4): gm
  modified_base (5)..(5): 2'-deoxy-2'-fluoroguanosine
  modified_base (6)..(6): 2'-O-methyladenosine
  modified_base (7)..(7): 2'-deoxy-2'-fluorouridine
  modified_base (8)..(8): gm
  modified_base (9)..(9): 2'-deoxy-2'-fluoroguanosine
  modified_base (10)..(10): um
  modified_base (11)..(11): gm
  modified_base (12)..(12): 2'-deoxy-2'-fluoroguanosine
  modified_base (13)..(13): 2'-O-methyladenosine
  modified_base (14)..(14): 2'-deoxy-2'-fluoroguanosine
  modified_base (15)..(15): gm
  modified_base (16)..(16): 2'-deoxy-2'-fluoroguanosine
  modified_base (17)..(17): cm
  modified_base (18)..(18): 2'-deoxy-2'-fluoroadenosine
  modified_base (19)..(19): gm
  modified_base (20)..(20): 2'-deoxy-2'-fluoroadenosine
  modified_base (21)..(21): um
  modified_base (22)..(22): 2'-deoxy-2'-fluoroguanosine
  misc_feature (22)..(23): 5'-phosphonothioate
  modified_base (23)..(23): 2'-O-methyladenosine
uauggaugguggagggcagauga

SEQ ID NO: 6373 - RNA, 23 nt, Artificial Sequence
  siRNA antisense strand against b2GPI
  modified_base (1)..(1): 2'-deoxy-2'-fluorouridine
  modified_base (2)..(2): 2'-O-methyladenosine
  misc_feature (2)..(3): 5'-phosphonothioate
  modified_base (3)..(3): 2'-deoxy-2'-fluoroguanosine
  modified_base (4)..(4): gm
  modified_base (5)..(5): 2'-deoxy-2'-fluorouridine
  modified_base (6)..(6): 2'-O-methyladenosine
  modified_base (7)..(7): 2'-deoxy-2'-fluorouridine
  modified_base (8)..(8): gm
  modified_base (9)..(9): 2'-deoxy-2'-fluoroguanosine
  modified_base (10)..(10): 2'-O-methyladenosine
  modified_base (11)..(11): um
  modified_base (12)..(12): 2'-deoxy-2'-fluoroguanosine
  modified_base (13)..(13): gm
  modified_base (14)..(14): 2'-deoxy-2'-fluorouridine
  modified_base (15)..(15): gm
  modified_base (16)..(16): 2'-deoxy-2'-fluoroguanosine
  modified_base (17)..(17): 2'-O-methyladenosine
  modified_base (18)..(18): 2'-deoxy-2'-fluoroguanosine
  modified_base (19)..(19): gm
  modified_base (20)..(20): 2'-deoxy-2'-fluoroguanosine
  modified_base (21)..(21): cm
  modified_base (22)..(22): 2'-deoxy-2'-fluoroadenosine
  misc_feature (22)..(23): 5'-phosphonothioate
  modified_base (23)..(23): gm
uagguauggaugguggagggcag

SEQ ID NO: 6374 - RNA, 23 nt, Artificial Sequence
  siRNA antisense strand against b2GPI
  modified_base (1)..(1): 2'-deoxy-2'-fluoroadenosine
  modified_base (2)..(2): cm
  misc_feature (2)..(3): 5'-phosphonothioate
  modified_base (3)..(3): 2'-deoxy-2'-fluoroguanosine
  modified_base (4)..(4): um
  modified_base (5)..(5): 2'-deoxy-2'-fluoroadenosine
  modified_base (6)..(6): gm
  modified_base (7)..(7): 2'-deoxy-2'-fluoroguanosine
  modified_base (8)..(8): um
  modified_base (9)..(9): 2'-deoxy-2'-fluoroadenosine
  modified_base (10)..(10): um
  modified_base (11)..(11): gm
  modified_base (12)..(12): 2'-deoxy-2'-fluoroguanosine
  modified_base (13)..(13): 2'-O-methyladenosine
  modified_base (14)..(14): 2'-deoxy-2'-fluorouridine
  modified_base (15)..(15): gm
  modified_base (16)..(16): 2'-deoxy-2'-fluoroguanosine
  modified_base (17)..(17): um
  modified_base (18)..(18): 2'-deoxy-2'-fluoroguanosine
  modified_base (19)..(19): gm
  modified_base (20)..(20): 2'-deoxy-2'-fluoroadenosine
  modified_base (21)..(21): gm
  modified_base (22)..(22): 2'-deoxy-2'-fluoroguanosine
  misc_feature (22)..(23): 5'-phosphonothioate
  modified_base (23)..(23): gm
acguagguauggaugguggaggg

SEQ ID NO: 6375 - RNA, 23 nt, Artificial Sequence
  siRNA antisense strand against b2GPI
  modified_base (1)..(1): 2'-deoxy-2'-fluoroadenosine
  modified_base (2)..(2): 2'-O-methyladenosine
  misc_feature (2)..(3): 5'-phosphonothioate
  modified_base (3)..(3): 2'-deoxy-2'-fluorocytidine
  modified_base (4)..(4): gm
  modified_base (5)..(5): 2'-deoxy-2'-fluorouridine
  modified_base (6)..(6): 2'-O-methyladenosine
  modified_base (7)..(7): 2'-deoxy-2'-fluoroguanosine
  modified_base (8)..(8): gm
  modified_base (9)..(9): 2'-deoxy-2'-fluorouridine
  modified_base (10)..(10): 2'-O-methyladenosine
  modified_base (11)..(11): um
  modified_base (12)..(12): 2'-deoxy-2'-fluoroguanosine
  modified_base (13)..(13): gm
  modified_base (14)..(14): 2'-deoxy-2'-fluoroadenosine
  modified_base (15)..(15): um
  modified_base (16)..(16): 2'-deoxy-2'-fluoroguanosine
  modified_base (17)..(17): gm
  modified_base (18)..(18): 2'-deoxy-2'-fluorouridine
  modified_base (19)..(19): gm
  modified_base (20)..(20): 2'-deoxy-2'-fluoroguanosine
  modified_base (21)..(21): 2'-O-methyladenosine
  modified_base (22)..(22): 2'-deoxy-2'-fluoroguanosine
  misc_feature (22)..(23): 5'-phosphonothioate
  modified_base (23)..(23): gm
aacguagguauggaugguggagg

SEQ ID NO: 6376 - RNA, 23 nt, Artificial Sequence
  siRNA antisense strand against b2GPI
  modified_base (1)..(1): 2'-deoxy-2'-fluoroadenosine
  modified_base (2)..(2): 2'-O-methyladenosine
  misc_feature (2)..(3): 5'-phosphonothioate
  modified_base (3)..(3): 2'-deoxy-2'-fluoroadenosine
  modified_base (4)..(4): cm
  modified_base (5)..(5): 2'-deoxy-2'-fluoroguanosine
  modified_base (6)..(6): um
  modified_base (7)..(7): 2'-deoxy-2'-fluoroadenosine
  modified_base (8)..(8): gm
  modified_base (9)..(9): 2'-deoxy-2'-fluoroguanosine
  modified_base (10)..(10): um
  modified_base (11)..(11): 2'-O-methyladenosine
  modified_base (12)..(12): 2'-deoxy-2'-fluorouridine
  modified_base (13)..(13): gm
  modified_base (14)..(14): 2'-deoxy-2'-fluoroguanosine
  modified_base (15)..(15): 2'-O-methyladenosine
  modified_base (16)..(16): 2'-deoxy-2'-fluorouridine
  modified_base (17)..(17): gm
  modified_base (18)..(18): 2'-deoxy-2'-fluoroguanosine
  modified_base (19)..(19): um
  modified_base (20)..(20): 2'-deoxy-2'-fluoroguanosine
  modified_base (21)..(21): gm
  modified_base (22)..(22): 2'-deoxy-2'-fluoroadenosine
  misc_feature (22)..(23): 5'-phosphonothioate
  modified_base (23)..(23): gm
aaacguagguauggaugguggag

SEQ ID NO: 6377 - RNA, 23 nt, Artificial Sequence
  siRNA antisense strand against b2GPI
  modified_base (1)..(1): 2'-deoxy-2'-fluorocytidine
  modified_base (2)..(2): 2'-O-methyladenosine
  misc_feature (2)..(3): 5'-phosphonothioate
  modified_base (3)..(3): 2'-deoxy-2'-fluoroadenosine
  modified_base (4)..(4): 2'-O-methyladenosine
  modified_base (5)..(5): 2'-deoxy-2'-fluorocytidine
  modified_base (6)..(6): gm
  modified_base (7)..(7): 2'-deoxy-2'-fluorouridine
  modified_base (8)..(8): 2'-O-methyladenosine
  modified_base (9)..(9): 2'-deoxy-2'-fluoroguanosine
  modified_base (10)..(10): gm
  modified_base (11)..(11): um
  modified_base (12)..(12): 2'-deoxy-2'-fluoroadenosine
  modified_base (13)..(13): um
  modified_base (14)..(14): 2'-deoxy-2'-fluoroguanosine
  modified_base (15)..(15): gm
  modified_base (16)..(16): 2'-deoxy-2'-fluoroadenosine
  modified_base (17)..(17): um
  modified_base (18)..(18): 2'-deoxy-2'-fluoroguanosine
  modified_base (19)..(19): gm
  modified_base (20)..(20): 2'-deoxy-2'-fluorouridine
  modified_base (21)..(21): gm
  modified_base (22)..(22): 2'-deoxy-2'-fluoroguanosine
  misc_feature (22)..(23): 5'-phosphonothioate
  modified_base (23)..(23): 2'-O-methyladenosine
caaacguagguauggauggugga

SEQ ID NO: 6378 - RNA, 23 nt, Artificial Sequence
  siRNA antisense strand against b2GPI
  modified_base (1)..(1): 2'-deoxy-2'-fluoroguanosine
  modified_base (2)..(2): cm
  misc_feature (2)..(3): 5'-phosphonothioate
  modified_base (3)..(3): 2'-deoxy-2'-fluoroadenosine
  modified_base (4)..(4): 2'-O-methyladenosine
  modified_base (5)..(5): 2'-deoxy-2'-fluoroadenosine
  modified_base (6)..(6): cm
  modified_base (7)..(7): 2'-deoxy-2'-fluoroguanosine
  modified_base (8)..(8): um
  modified_base (9)..(9): 2'-deoxy-2'-fluoroadenosine
  modified_base (10)..(10): gm
  modified_base (11)..(11): gm
  modified_base (12)..(12): 2'-deoxy-2'-fluorouridine
  modified_base (13)..(13): 2'-O-methyladenosine
  modified_base (14)..(14): 2'-deoxy-2'-fluorouridine
  modified_base (15)..(15): gm
  modified_base (16)..(16): 2'-deoxy-2'-fluoroguanosine
  modified_base (17)..(17): 2'-O-methyladenosine
  modified_base (18)..(18): 2'-deoxy-2'-fluorouridine
  modified_base (19)..(19): gm
  modified_base (20)..(20): 2'-deoxy-2'-fluoroguanosine
  modified_base (21)..(21): um
  modified_base (22)..(22): 2'-deoxy-2'-fluoroguanosine
  misc_feature (22)..(23): 5'-phosphonothioate
  modified_base (23)..(23): gm
gcaaacguagguauggauggugg

SEQ ID NO: 6379 - RNA, 23 nt, Artificial Sequence
  siRNA antisense strand against b2GPI
  modified_base (1)..(1): 2'-deoxy-2'-fluorouridine
  modified_base (2)..(2): gm
  misc_feature (2)..(3): 5'-phosphonothioate
  modified_base (3)..(3): 2'-deoxy-2'-fluorocytidine
  modified_base (4)..(4): 2'-O-methyladenosine
  modified_base (5)..(5): 2'-deoxy-2'-fluoroadenosine
  modified_base (6)..(6): 2'-O-methyladenosine
  modified_base (7)..(7): 2'-deoxy-2'-fluorocytidine
  modified_base (8)..(8): gm
  modified_base (9)..(9): 2'-deoxy-2'-fluorouridine
  modified_base (10)..(10): 2'-O-methyladenosine
  modified_base (11)..(11): gm
  modified_base (12)..(12): 2'-deoxy-2'-fluoroguanosine
  modified_base (13)..(13): um
  modified_base (14)..(14): 2'-deoxy-2'-fluoroadenosine
  modified_base (15)..(15): um
  modified_base (16)..(16): 2'-deoxy-2'-fluoroguanosine
  modified_base (17)..(17): gm
  modified_base (18)..(18): 2'-deoxy-2'-fluoroadenosine
  modified_base (19)..(19): um
  modified_base (20)..(20): 2'-deoxy-2'-fluoroguanosine
  modified_base (21)..(21): gm
  modified_base (22)..(22): 2'-deoxy-2'-fluorouridine
  misc_feature (22)..(23): 5'-phosphonothioate
  modified_base (23)..(23): gm
ugcaaacguagguauggauggug

SEQ ID NO: 6380 - RNA, 23 nt, Artificial Sequence
  siRNA antisense strand against b2GPI
  modified_base (1)..(1): 2'-deoxy-2'-fluorouridine
  modified_base (2)..(2): um
  misc_feature (2)..(3): 5'-phosphonothioate
  modified_base (3)..(3): 2'-deoxy-2'-fluoroguanosine
  modified_base (4)..(4): cm
  modified_base (5)..(5): 2'-deoxy-2'-fluoroadenosine
  modified_base (6)..(6): 2'-O-methyladenosine
  modified_base (7)..(7): 2'-deoxy-2'-fluoroadenosine
  modified_base (8)..(8): cm
  modified_base (9)..(9): 2'-deoxy-2'-fluoroguanosine
  modified_base (10)..(10): um
  modified_base (11)..(11): 2'-O-methyladenosine
  modified_base (12)..(12): 2'-deoxy-2'-fluoroguanosine
  modified_base (13)..(13): gm
  modified_base (14)..(14): 2'-deoxy-2'-fluorouridine
  modified_base (15)..(15): 2'-O-methyladenosine
  modified_base (16)..(16): 2'-deoxy-2'-fluorouridine
  modified_base (17)..(17): gm
  modified_base (18)..(18): 2'-deoxy-2'-fluoroguanosine
  modified_base (19)..(19): 2'-O-methyladenosine
  modified_base (20)..(20): 2'-deoxy-2'-fluorouridine
  modified_base (21)..(21): gm
  modified_base (22)..(22): 2'-deoxy-2'-fluoroguanosine
  misc_feature (22)..(23): 5'-phosphonothioate
  modified_base (23)..(23): um
uugcaaacguagguauggauggu

SEQ ID NO: 6381 - RNA, 23 nt, Artificial Sequence
  siRNA antisense strand against b2GPI
  modified_base (1)..(1): 2'-deoxy-2'-fluorouridine
  modified_base (2)..(2): gm
  misc_feature (2)..(3): 5'-phosphonothioate
  modified_base (3)..(3): 2'-deoxy-2'-fluorouridine
  modified_base (4)..(4): um
  modified_base (5)..(5): 2'-deoxy-2'-fluoroguanosine
  modified_base (6)..(6): cm
  modified_base (7)..(7): 2'-deoxy-2'-fluoroadenosine
  modified_base (8)..(8): 2'-O-methyladenosine
  modified_base (9)..(9): 2'-deoxy-2'-fluoroadenosine
  modified_base (10)..(10): cm
  modified_base (11)..(11): gm
  modified_base (12)..(12): 2'-deoxy-2'-fluorouridine
  modified_base (13)..(13): 2'-O-methyladenosine
  modified_base (14)..(14): 2'-deoxy-2'-fluoroguanosine
  modified_base (15)..(15): gm
  modified_base (16)..(16): 2'-deoxy-2'-fluorouridine
  modified_base (17)..(17): 2'-O-methyladenosine
  modified_base (18)..(18): 2'-deoxy-2'-fluorouridine
  modified_base (19)..(19): gm
  modified_base (20)..(20): 2'-deoxy-2'-fluoroguanosine
  modified_base (21)..(21): 2'-O-methyladenosine
  modified_base (22)..(22): 2'-deoxy-2'-fluorouridine
  misc_feature (22)..(23): 5'-phosphonothioate
  modified_base (23)..(23): gm
uguugcaaacguagguauggaug

SEQ ID NO: 6382 - RNA, 23 nt, Artificial Sequence
  siRNA antisense strand against b2GPI
  modified_base (1)..(1): 2'-deoxy-2'-fluoroadenosine
  modified_base (2)..(2): 2'-O-methyladenosine
  misc_feature (2)..(3): 5'-phosphonothioate
  modified_base (3)..(3): 2'-deoxy-2'-fluoroguanosine
  modified_base (4)..(4): um
  modified_base (5)..(5): 2'-deoxy-2'-fluoroguanosine
  modified_base (6)..(6): um
  modified_base (7)..(7): 2'-deoxy-2'-fluorouridine
  modified_base (8)..(8): gm
  modified_base (9)..(9): 2'-deoxy-2'-fluorocytidine
  modified_base (10)..(10): 2'-O-methyladenosine
  modified_base (11)..(11): 2'-O-methyladenosine
  modified_base (12)..(12): 2'-deoxy-2'-fluoroadenosine
  modified_base (13)..(13): cm
  modified_base (14)..(14): 2'-deoxy-2'-fluoroguanosine
  modified_base (15)..(15): um
  modified_base (16)..(16): 2'-deoxy-2'-fluoroadenosine
  modified_base (17)..(17): gm
  modified_base (18)..(18): 2'-deoxy-2'-fluoroguanosine
  modified_base (19)..(19): um
  modified_base (20)..(20): 2'-deoxy-2'-fluoroadenosine
  modified_base (21)..(21): um
  modified_base (22)..(22): 2'-deoxy-2'-fluoroguanosine
  misc_feature (22)..(23): 5'-phosphonothioate
  modified_base (23)..(23): gm
aaguguugcaaacguagguaugg

SEQ ID NO: 6383 - RNA, 23 nt, Artificial Sequence
  siRNA antisense strand against b2GPI
  modified_base (1)..(1): 2'-deoxy-2'-fluoroguanosine
  modified_base (2)..(2): 2'-O-methyladenosine
  misc_feature (2)..(3): 5'-phosphonothioate
  modified_base (3)..(3): 2'-deoxy-2'-fluoroadenosine
  modified_base (4)..(4): gm
  modified_base (5)..(5): 2'-deoxy-2'-fluorouridine
  modified_base (6)..(6): gm
  modified_base (7)..(7): 2'-deoxy-2'-fluorouridine
  modified_base (8)..(8): um
  modified_base (9)..(9): 2'-deoxy-2'-fluoroguanosine
  modified_base (10)..(10): cm
  modified_base (11)..(11): 2'-O-methyladenosine
  modified_base (12)..(12): 2'-deoxy-2'-fluoroadenosine
  modified_base (13)..(13): 2'-O-methyladenosine
  modified_base (14)..(14): 2'-deoxy-2'-fluorocytidine
  modified_base (15)..(15): gm
  modified_base (16)..(16): 2'-deoxy-2'-fluorouridine
  modified_base (17)..(17): 2'-O-methyladenosine
  modified_base (18)..(18): 2'-deoxy-2'-fluoroguanosine
  modified_base (19)..(19): gm
  modified_base (20)..(20): 2'-deoxy-2'-fluorouridine
  modified_base (21)..(21): 2'-O-methyladenosine
  modified_base (22)..(22): 2'-deoxy-2'-fluorouridine
  misc_feature (22)..(23): 5'-phosphonothioate
  modified_base (23)..(23): gm
gaaguguugcaaacguagguaug

SEQ ID NO: 6384 - RNA, 23 nt, Artificial Sequence
  siRNA antisense strand against b2GPI
  modified_base (1)..(1): 2'-deoxy-2'-fluorocytidine
  modified_base (2)..(2): gm
  misc_feature (2)..(3): 5'-phosphonothioate
  modified_base (3)..(3): 2'-deoxy-2'-fluoroadenosine
  modified_base (4)..(4): 2'-O-methyladenosine
  modified_base (5)..(5): 2'-deoxy-2'-fluoroguanosine
  modified_base (6)..(6): um
  modified_base (7)..(7): 2'-deoxy-2'-fluoroguanosine
  modified_base (8)..(8): um
  modified_base (9)..(9): 2'-deoxy-2'-fluorouridine
  modified_base (10)..(10): gm
  modified_base (11)..(11): cm
  modified_base (12)..(12): 2'-deoxy-2'-fluoroadenosine
  modified_base (13)..(13): 2'-O-methyladenosine
  modified_base (14)..(14): 2'-deoxy-2'-fluoroadenosine
  modified_base (15)..(15): cm
  modified_base (16)..(16): 2'-deoxy-2'-fluoroguanosine
  modified_base (17)..(17): um
  modified_base (18)..(18): 2'-deoxy-2'-fluoroadenosine
  modified_base (19)..(19): gm
  modified_base (20)..(20): 2'-deoxy-2'-fluoroguanosine
  modified_base (21)..(21): um
  modified_base (22)..(22): 2'-deoxy-2'-fluoroadenosine
  misc_feature (22)..(23): 5'-phosphonothioate
  modified_base (23)..(23): um
cgaaguguugcaaacguagguau

SEQ ID NO: 6385 - RNA, 23 nt, Artificial Sequence
  siRNA antisense strand against b2GPI
  modified_base (1)..(1): 2'-deoxy-2'-fluoroadenosine
  modified_base (2)..(2): cm
  misc_feature (2)..(3): 5'-phosphonothioate
  modified_base (3)..(3): 2'-deoxy-2'-fluoroguanosine
  modified_base (4)..(4): 2'-O-methyladenosine
  modified_base (5)..(5): 2'-deoxy-2'-fluoroadenosine
  modified_base (6)..(6): gm
  modified_base (7)..(7): 2'-deoxy-2'-fluorouridine
  modified_base (8)..(8): gm
  modified_base (9)..(9): 2'-deoxy-2'-fluorouridine
  modified_base (10)..(10): um
  modified_base (11)..(11): gm
  modified_base (12)..(12): 2'-deoxy-2'-fluorocytidine
  modified_base (13)..(13): 2'-O-methyladenosine
  modified_base (14)..(14): 2'-deoxy-2'-fluoroadenosine
  modified_base (15)..(15): 2'-O-methyladenosine
  modified_base (16)..(16): 2'-deoxy-2'-fluorocytidine
  modified_base (17)..(17): gm
  modified_base (18)..(18): 2'-deoxy-2'-fluorouridine
  modified_base (19)..(19): 2'-O-methyladenosine
  modified_base (20)..(20): 2'-deoxy-2'-fluoroguanosine
  modified_base (21)..(21): gm
  modified_base (22)..(22): 2'-deoxy-2'-fluorouridine
  misc_feature (22)..(23): 5'-phosphonothioate
  modified_base (23)..(23): 2'-O-methyladenosine
acgaaguguugcaaacguaggua

SEQ ID NO: 6386 - RNA, 23 nt, Artificial Sequence
  siRNA antisense strand against b2GPI
  modified_base (1)..(1): 2'-deoxy-2'-fluorocytidine
  modified_base (2)..(2): 2'-O-methyladenosine
  misc_feature (2)..(3): 5'-phosphonothioate
  modified_base (3)..(3): 2'-deoxy-2'-fluorocytidine
  modified_base (4)..(4): gm
  modified_base (5)..(5): 2'-deoxy-2'-fluoroadenosine
  modified_base (6)..(6): 2'-O-methyladenosine
  modified_base (7)..(7): 2'-deoxy-2'-fluoroguanosine
  modified_base (8)..(8): um
  modified_base (9)..(9): 2'-deoxy-2'-fluoroguanosine
  modified_base (10)..(10): um
  modified_base (11)..(11): um
  modified_base (12)..(12): 2'-deoxy-2'-fluoroguanosine
  modified_base (13)..(13): cm
  modified_base (14)..(14): 2'-deoxy-2'-fluoroadenosine
  modified_base (15)..(15): 2'-O-methyladenosine
  modified_base (16)..(16): 2'-deoxy-2'-fluoroadenosine
  modified_base (17)..(17): cm
  modified_base (18)..(18): 2'-deoxy-2'-fluoroguanosine
  modified_base (19)..(19): um
  modified_base (20)..(20): 2'-deoxy-2'-fluoroadenosine
  modified_base (21)..(21): gm
  modified_base (22)..(22): 2'-deoxy-2'-fluoroguanosine
  misc_feature (22)..(23): 5'-phosphonothioate
  modified_base (23)..(23): um
cacgaaguguugcaaacguaggu

SEQ ID NO: 6387 - RNA, 23 nt, Artificial Sequence
  siRNA antisense strand against b2GPI
  modified_base (1)..(1): 2'-deoxy-2'-fluoroadenosine
  modified_base (2)..(2): cm
  misc_feature (2)..(3): 5'-phosphonothioate
  modified_base (3)..(3): 2'-deoxy-2'-fluoroadenosine
  modified_base (4)..(4): cm
  modified_base (5)..(5): 2'-deoxy-2'-fluoroguanosine
  modified_base (6)..(6): 2'-O-methyladenosine
  modified_base (7)..(7): 2'-deoxy-2'-fluoroadenosine
  modified_base (8)..(8): gm
  modified_base (9)..(9): 2'-deoxy-2'-fluorouridine
  modified_base (10)..(10): gm
  modified_base (11)..(11): um
  modified_base (12)..(12): 2'-deoxy-2'-fluorouridine
  modified_base (13)..(13): gm
  modified_base (14)..(14): 2'-deoxy-2'-fluorocytidine
  modified_base (15)..(15): 2'-O-methyladenosine
  modified_base (16)..(16): 2'-deoxy-2'-fluoroadenosine
  modified_base (17)..(17): 2'-O-methyladenosine
  modified_base (18)..(18): 2'-deoxy-2'-fluorocytidine
  modified_base (19)..(19): gm
  modified_base (20)..(20): 2'-deoxy-2'-fluorouridine
  modified_base (21)..(21): 2'-O-methyladenosine
  modified_base (22)..(22): 2'-deoxy-2'-fluoroguanosine
  misc_feature (22)..(23): 5'-phosphonothioate
  modified_base (23)..(23): gm
acacgaaguguugcaaacguagg

SEQ ID NO: 6388 - RNA, 23 nt, Artificial Sequence
  siRNA antisense strand against b2GPI
  modified_base (1)..(1): 2'-deoxy-2'-fluoroadenosine
  modified_base (2)..(2): 2'-O-methyladenosine
  misc_feature (2)..(3): 5'-phosphonothioate
  modified_base (3)..(3): 2'-deoxy-2'-fluorocytidine
  modified_base (4)..(4): 2'-O-methyladenosine
  modified_base (5)..(5): 2'-deoxy-2'-fluorocytidine
  modified_base (6)..(6): gm
  modified_base (7)..(7): 2'-deoxy-2'-fluoroadenosine
  modified_base (8)..(8): 2'-O-methyladenosine
  modified_base (9)..(9): 2'-deoxy-2'-fluoroguanosine
  modified_base (10)..(10): um
  modified_base (11)..(11): gm
  modified_base (12)..(12): 2'-deoxy-2'-fluorouridine
  modified_base (13)..(13): um
  modified_base (14)..(14): 2'-deoxy-2'-fluoroguanosine
  modified_base (15)..(15): cm
  modified_base (16)..(16): 2'-deoxy-2'-fluoroadenosine
  modified_base (17)..(17): 2'-O-methyladenosine
  modified_base (18)..(18): 2'-deoxy-2'-fluoroadenosine
  modified_base (19)..(19): cm
  modified_base (20)..(20): 2'-deoxy-2'-fluoroguanosine
  modified_base (21)..(21): um
  modified_base (22)..(22): 2'-deoxy-2'-fluoroadenosine
  misc_feature (22)..(23): 5'-phosphonothioate
  modified_base (23)..(23): gm
aacacgaaguguugcaaacguag

SEQ ID NO: 6389 - RNA, 23 nt, Artificial Sequence
  siRNA antisense strand against b2GPI
  modified_base (1)..(1): 2'-deoxy-2'-fluoroadenosine
  modified_base (2)..(2): 2'-O-methyladenosine
  misc_feature (2)..(3): 5'-phosphonothioate
  modified_base (3)..(3): 2'-deoxy-2'-fluoroadenosine
  modified_base (4)..(4): cm
  modified_base (5)..(5): 2'-deoxy-2'-fluoroadenosine
  modified_base (6)..(6): cm
  modified_base (7)..(7): 2'-deoxy-2'-fluoroguanosine
  modified_base (8)..(8): 2'-O-methyladenosine
  modified_base (9)..(9): 2'-deoxy-2'-fluoroadenosine
  modified_base (10)..(10): gm
  modified_base (11)..(11): um
  modified_base (12)..(12): 2'-deoxy-2'-fluoroguanosine
  modified_base (13)..(13): um
  modified_base (14)..(14): 2'-deoxy-2'-fluorouridine
  modified_base (15)..(15): gm
  modified_base (16)..(16): 2'-deoxy-2'-fluorocytidine
  modified_base (17)..(17): 2'-O-methyladenosine
  modified_base (18)..(18): 2'-deoxy-2'-fluoroadenosine
  modified_base (19)..(19): 2'-O-methyladenosine
  modified_base (20)..(20): 2'-deoxy-2'-fluorocytidine
  modified_base (21)..(21): gm
  modified_base (22)..(22): 2'-deoxy-2'-fluorouridine
  misc_feature (22)..(23): 5'-phosphonothioate
  modified_base (23)..(23): 2'-O-methyladenosine
aaacacgaaguguugcaaacgua

SEQ ID NO: 6390 - RNA, 23 nt, Artificial Sequence
  siRNA antisense strand against b2GPI
  modified_base (1)..(1): 2'-deoxy-2'-fluorouridine
  modified_base (2)..(2): 2'-O-methyladenosine
  misc_feature (2)..(3): 5'-phosphonothioate
  modified_base (3)..(3): 2'-deoxy-2'-fluoroadenosine
  modified_base (4)..(4): 2'-O-methyladenosine
  modified_base (5)..(5): 2'-deoxy-2'-fluorocytidine
  modified_base (6)..(6): 2'-O-methyladenosine
  modified_base (7)..(7): 2'-deoxy-2'-fluorocytidine
  modified_base (8)..(8): gm
  modified_base (9)..(9): 2'-deoxy-2'-fluoroadenosine
  modified_base (10)..(10): 2'-O-methyladenosine
  modified_base (11)..(11): gm
  modified_base (12)..(12): 2'-deoxy-2'-fluorouridine
  modified_base (13)..(13): gm
  modified_base (14)..(14): 2'-deoxy-2'-fluorouridine
  modified_base (15)..(15): um
  modified_base (16)..(16): 2'-deoxy-2'-fluoroguanosine
  modified_base (17)..(17): cm
  modified_base (18)..(18): 2'-deoxy-2'-fluoroadenosine
  modified_base (19)..(19): 2'-O-methyladenosine
  modified_base (20)..(20): 2'-deoxy-2'-fluoroadenosine
  modified_base (21)..(21): cm
  modified_base (22)..(22): 2'-deoxy-2'-fluoroguanosine
  misc_feature (22)..(23): 5'-phosphonothioate
  modified_base (23)..(23): um
uaaacacgaaguguugcaaacgu

SEQ ID NO: 6391 - RNA, 23 nt, Artificial Sequence
  siRNA antisense strand against b2GPI
  modified_base (1)..(1): 2'-deoxy-2'-fluoroadenosine
  modified_base (2)..(2): um
  misc_feature (2)..(3): 5'-phosphonothioate
  modified_base (3)..(3): 2'-deoxy-2'-fluoroadenosine
  modified_base (4)..(4): 2'-O-methyladenosine
  modified_base (5)..(5): 2'-deoxy-2'-fluoroadenosine
  modified_base (6)..(6): cm
  modified_base (7)..(7): 2'-deoxy-2'-fluoroadenosine
  modified_base (8)..(8): cm
  modified_base (9)..(9): 2'-deoxy-2'-fluoroguanosine
  modified_base (10)..(10): 2'-O-methyladenosine
  modified_base (11)..(11): 2'-O-methyladenosine
  modified_base (12)..(12): 2'-deoxy-2'-fluoroguanosine
  modified_base (13)..(13): um
  modified_base (14)..(14): 2'-deoxy-2'-fluoroguanosine
  modified_base (15)..(15): um
  modified_base (16)..(16): 2'-deoxy-2'-fluorouridine
  modified_base (17)..(17): gm
  modified_base (18)..(18): 2'-deoxy-2'-fluorocytidine
  modified_base (19)..(19): 2'-O-methyladenosine
  modified_base (20)..(20): 2'-deoxy-2'-fluoroadenosine
  modified_base (21)..(21): 2'-O-methyladenosine
  modified_base (22)..(22): 2'-deoxy-2'-fluorocytidine
  misc_feature (22)..(23): 5'-phosphonothioate
  modified_base (23)..(23): gm
auaaacacgaaguguugcaaacg

SEQ ID NO: 6392 - RNA, 23 nt, Artificial Sequence
  siRNA antisense strand against b2GPI
  modified_base (1)..(1): 2'-deoxy-2'-fluorouridine
  modified_base (2)..(2): 2'-O-methyladenosine
  misc_feature (2)..(3): 5'-phosphonothioate
  modified_base (3)..(3): 2'-deoxy-2'-fluorouridine
  modified_base (4)..(4): 2'-O-methyladenosine
  modified_base (5)..(5): 2'-deoxy-2'-fluoroadenosine
  modified_base (6)..(6): 2'-O-methyladenosine
  modified_base (7)..(7): 2'-deoxy-2'-fluorocytidine
  modified_base (8)..(8): 2'-O-methyladenosine
  modified_base (9)..(9): 2'-deoxy-2'-fluorocytidine
  modified_base (10)..(10): gm
  modified_base (11)..(11): 2'-O-methyladenosine
  modified_base (12)..(12): 2'-deoxy-2'-fluoroadenosine
  modified_base (13)..(13): gm
  modified_base (14)..(14): 2'-deoxy-2'-fluorouridine
  modified_base (15)..(15): gm
  modified_base (16)..(16): 2'-deoxy-2'-fluorouridine
  modified_base (17)..(17): um
  modified_base (18)..(18): 2'-deoxy-2'-fluoroguanosine
  modified_base (19)..(19): cm
  modified_base (20)..(20): 2'-deoxy-2'-fluoroadenosine
  modified_base (21)..(21): 2'-O-methyladenosine
  modified_base (22)..(22): 2'-deoxy-2'-fluoroadenosine
  misc_feature (22)..(23): 5'-phosphonothioate
  modified_base (23)..(23): cm
uauaaacacgaaguguugcaaac

SEQ ID NO: 6393 - RNA, 23 nt, Artificial Sequence
  siRNA antisense strand against b2GPI
  modified_base (1)..(1): 2'-deoxy-2'-fluorouridine
  modified_base (2)..(2): um
  misc_feature (2)..(3): 5'-phosphonothioate
  modified_base (3)..(3): 2'-deoxy-2'-fluoroadenosine
  modified_base (4)..(4): um
  modified_base (5)..(5): 2'-deoxy-2'-fluoroadenosine
  modified_base (6)..(6): 2'-O-methyladenosine
  modified_base (7)..(7): 2'-deoxy-2'-fluoroadenosine
  modified_base (8)..(8): cm
  modified_base (9)..(9): 2'-deoxy-2'-fluoroadenosine
  modified_base (10)..(10): cm
  modified_base (11)..(11): gm
  modified_base (12)..(12): 2'-deoxy-2'-fluoroadenosine
  modified_base (13)..(13): 2'-O-methyladenosine
  modified_base (14)..(14): 2'-deoxy-2'-fluoroguanosine
  modified_base (15)..(15): um
  modified_base (16)..(16): 2'-deoxy-2'-fluoroguanosine
  modified_base (17)..(17): um
  modified_base (18)..(18): 2'-deoxy-2'-fluorouridine
  modified_base (19)..(19): gm
  modified_base (20)..(20): 2'-deoxy-2'-fluorocytidine
  modified_base (21)..(21): 2'-O-methyladenosine
  modified_base (22)..(22): 2'-deoxy-2'-fluoroadenosine
  misc_feature (22)..(23): 5'-phosphonothioate
  modified_base (23)..(23): 2'-O-methyladenosine
uuauaaacacgaaguguugcaaa

SEQ ID NO: 6394 - RNA, 23 nt, Artificial Sequence
  siRNA antisense strand against b2GPI
  modified_base (1)..(1): 2'-deoxy-2'-fluorocytidine
  modified_base (2)..(2): um
  misc_feature (2)..(3): 5'-phosphonothioate
  modified_base (3)..(3): 2'-deoxy-2'-fluorouridine
  modified_base (4)..(4): 2'-O-methyladenosine
  modified_base (5)..(5): 2'-deoxy-2'-fluorouridine
  modified_base (6)..(6): 2'-O-methyladenosine
  modified_base (7)..(7): 2'-deoxy-2'-fluoroadenosine
  modified_base (8)..(8): 2'-O-methyladenosine
  modified_base (9)..(9): 2'-deoxy-2'-fluorocytidine
  modified_base (10)..(10): 2'-O-methyladenosine
  modified_base (11)..(11): cm
  modified_base (12)..(12): 2'-deoxy-2'-fluoroguanosine
  modified_base (13)..(13): 2'-O-methyladenosine
  modified_base (14)..(14): 2'-deoxy-2'-fluoroadenosine
  modified_base (15)..(15): gm
  modified_base (16)..(16): 2'-deoxy-2'-fluorouridine
  modified_base (17)..(17): gm
  modified_base (18)..(18): 2'-deoxy-2'-fluorouridine
  modified_base (19)..(19): um
  modified_base (20)..(20): 2'-deoxy-2'-fluoroguanosine
  modified_base (21)..(21): cm
  modified_base (22)..(22): 2'-deoxy-2'-fluoroadenosine
  misc_feature (22)..(23): 5'-phosphonothioate
  modified_base (23)..(23): 2'-O-methyladenosine
cuuauaaacacgaaguguugcaa

SEQ ID NO: 6395 - RNA, 23 nt, Artificial Sequence
  siRNA antisense strand against b2GPI
  modified_base (1)..(1): 2'-deoxy-2'-fluorouridine
  modified_base (2)..(2): gm
  misc_feature (2)..(3): 5'-phosphonothioate
  modified_base (3)..(3): 2'-deoxy-2'-fluoroguanosine
  modified_base (4)..(4): cm
  modified_base (5)..(5): 2'-deoxy-2'-fluorouridine
  modified_base (6)..(6): um
  modified_base (7)..(7): 2'-deoxy-2'-fluoroadenosine
  modified_base (8)..(8): um
  modified_base (9)..(9): 2'-deoxy-2'-fluoroadenosine
  modified_base (10)..(10): 2'-O-methyladenosine
  modified_base (11)..(11): 2'-O-methyladenosine
  modified_base (12)..(12): 2'-deoxy-2'-fluorocytidine
  modified_base (13)..(13): 2'-O-methyladenosine
  modified_base (14)..(14): 2'-deoxy-2'-fluorocytidine
  modified_base (15)..(15): gm
  modified_base (16)..(16): 2'-deoxy-2'-fluoroadenosine
  modified_base (17)..(17): 2'-O-methyladenosine
  modified_base (18)..(18): 2'-deoxy-2'-fluoroguanosine
  modified_base (19)..(19): um
  modified_base (20)..(20): 2'-deoxy-2'-fluoroguanosine
  modified_base (21)..(21): um
  modified_base (22)..(22): 2'-deoxy-2'-fluorouridine
  misc_feature (22)..(23): 5'-phosphonothioate
  modified_base (23)..(23): gm
uggcuuauaaacacgaaguguug

SEQ ID NO: 6396 - RNA, 23 nt, Artificial Sequence
  siRNA antisense strand against b2GPI
  modified_base (1)..(1): 2'-deoxy-2'-fluoroadenosine
  modified_base (2)..(2): um
  misc_feature (2)..(3): 5'-phosphonothioate
  modified_base (3)..(3): 2'-deoxy-2'-fluoroguanosine
  modified_base (4)..(4): gm
  modified_base (5)..(5): 2'-deoxy-2'-fluorocytidine
  modified_base (6)..(6): um
  modified_base (7)..(7): 2'-deoxy-2'-fluorouridine
  modified_base (8)..(8): 2'-O-methyladenosine
  modified_base (9)..(9): 2'-deoxy-2'-fluorouridine
  modified_base (10)..(10): 2'-O-methyladenosine
  modified_base (11)..(11): 2'-O-methyladenosine
  modified_base (12)..(12): 2'-deoxy-2'-fluoroadenosine
  modified_base (13)..(13): cm
  modified_base (14)..(14): 2'-deoxy-2'-fluoroadenosine
  modified_base (15)..(15): cm
  modified_base (16)..(16): 2'-deoxy-2'-fluoroguanosine
  modified_base (17)..(17): 2'-O-methyladenosine
  modified_base (18)..(18): 2'-deoxy-2'-fluoroadenosine
  modified_base (19)..(19): gm
  modified_base (20)..(20): 2'-deoxy-2'-fluorouridine
  modified_base (21)..(21): gm
  modified_base (22)..(22): 2'-deoxy-2'-fluorouridine
  misc_feature (22)..(23): 5'-phosphonothioate
  modified_base (23)..(23): um
auggcuuauaaacacgaaguguu

SEQ ID NO: 6397 - RNA, 23 nt, Artificial Sequence
  siRNA antisense strand against b2GPI
  modified_base (1)..(1): 2'-deoxy-2'-fluoroguanosine
  modified_base (2)..(2): cm
  misc_feature (2)..(3): 5'-phosphonothioate
  modified_base (3)..(3): 2'-deoxy-2'-fluorouridine
  modified_base (4)..(4): gm
  modified_base (5)..(5): 2'-deoxy-2'-fluoroadenosine
  modified_base (6)..(6): um
  modified_base (7)..(7): 2'-deoxy-2'-fluoroguanosine
  modified_base (8)..(8): gm
  modified_base (9)..(9): 2'-deoxy-2'-fluorocytidine
  modified_base (10)..(10): um
  modified_base (11)..(11): um
  modified_base (12)..(12): 2'-deoxy-2'-fluoroadenosine
  modified_base (13)..(13): um
  modified_base (14)..(14): 2'-deoxy-2'-fluoroadenosine
  modified_base (15)..(15): 2'-O-methyladenosine
  modified_base (16)..(16): 2'-deoxy-2'-fluoroadenosine
  modified_base (17)..(17): cm
  modified_base (18)..(18): 2'-deoxy-2'-fluoroadenosine
  modified_base (19)..(19): cm
  modified_base (20)..(20): 2'-deoxy-2'-fluoroguanosine
  modified_base (21)..(21): 2'-O-methyladenosine
  modified_base (22)..(22): 2'-deoxy-2'-fluoroadenosine
  misc_feature (22)..(23): 5'-phosphonothioate
  modified_base (23)..(23): gm
gcugauggcuuauaaacacgaag

SEQ ID NO: 6398 - RNA, 23 nt, Artificial Sequence
  siRNA antisense strand against b2GPI
  modified_base (1)..(1): 2'-deoxy-2'-fluoroadenosine
  modified_base (2)..(2): gm
  misc_feature (2)..(3): 5'-phosphonothioate
  modified_base (3)..(3): 2'-deoxy-2'-fluorocytidine
  modified_base (4)..(4): um
  modified_base (5)..(5): 2'-deoxy-2'-fluoroguanosine
  modified_base (6)..(6): 2'-O-methyladenosine
  modified_base (7)..(7): 2'-deoxy-2'-fluorouridine
  modified_base (8)..(8): gm
  modified_base (9)..(9): 2'-deoxy-2'-fluoroguanosine
  modified_base (10)..(10): cm
  modified_base (11)..(11): um
  modified_base (12)..(12): 2'-deoxy-2'-fluorouridine
  modified_base (13)..(13): 2'-O-methyladenosine
  modified_base (14)..(14): 2'-deoxy-2'-fluorouridine
  modified_base (15)..(15): 2'-O-methyladenosine
  modified_base (16)..(16): 2'-deoxy-2'-fluoroadenosine
  modified_base (17)..(17): 2'-O-methyladenosine
  modified_base (18)..(18): 2'-deoxy-2'-fluorocytidine
  modified_base (19)..(19): 2'-O-methyladenosine
  modified_base (20)..(20): 2'-deoxy-2'-fluorocytidine
  modified_base (21)..(21): gm
  modified_base (22)..(22): 2'-deoxy-2'-fluoroadenosine
  misc_feature (22)..(23): 5'-phosphonothioate
  modified_base (23)..(23): 2'-O-methyladenosine
agcugauggcuuauaaacacgaa

SEQ ID NO: 6399 - RNA, 23 nt, Artificial Sequence
  siRNA antisense strand against b2GPI
  modified_base (1)..(1): 2'-deoxy-2'-fluorocytidine
  modified_base (2)..(2): 2'-O-methyladenosine
  misc_feature (2)..(3): 5'-phosphonothioate
  modified_base (3)..(3): 2'-deoxy-2'-fluoroguanosine
  modified_base (4)..(4): cm
  modified_base (5)..(5): 2'-deoxy-2'-fluorouridine
  modified_base (6)..(6): gm
  modified_base (7)..(7): 2'-deoxy-2'-fluoroadenosine
  modified_base (8)..(8): um
  modified_base (9)..(9): 2'-deoxy-2'-fluoroguanosine
  modified_base (10)..(10): gm
  modified_base (11)..(11): cm
  modified_base (12)..(12): 2'-deoxy-2'-fluorouridine
  modified_base (13)..(13): um
  modified_base (14)..(14): 2'-deoxy-2'-fluoroadenosine
  modified_base (15)..(15): um
  modified_base (16)..(16): 2'-deoxy-2'-fluoroadenosine
  modified_base (17)..(17): 2'-O-methyladenosine
  modified_base (18)..(18): 2'-deoxy-2'-fluoroadenosine
  modified_base (19)..(19): cm
  modified_base (20)..(20): 2'-deoxy-2'-fluoroadenosine
  modified_base (21)..(21): cm
  modified_base (22)..(22): 2'-deoxy-2'-fluoroguanosine
  misc_feature (22)..(23): 5'-phosphonothioate
  modified_base (23)..(23): 2'-O-methyladenosine
cagcugauggcuuauaaacacga

SEQ ID NO: 6400 - RNA, 23 nt, Artificial Sequence
  siRNA antisense strand against b2GPI
  modified_base (1)..(1): 2'-deoxy-2'-fluorouridine
  modified_base (2)..(2): gm
  misc_feature (2)..(3): 5'-phosphonothioate
  modified_base (3)..(3): 2'-deoxy-2'-fluorouridine
  modified_base (4)..(4): um
  modified_base (5)..(5): 2'-deoxy-2'-fluorouridine
  modified_base (6)..(6): cm
  modified_base (7)..(7): 2'-deoxy-2'-fluorocytidine
  modified_base (8)..(8): 2'-O-methyladenosine
  modified_base (9)..(9): 2'-deoxy-2'-fluoroguanosine
  modified_base (10)..(10): cm
  modified_base (11)..(11): um
  modified_base (12)..(12): 2'-deoxy-2'-fluoroguanosine
  modified_base (13)..(13): 2'-O-methyladenosine
  modified_base (14)..(14): 2'-deoxy-2'-fluorouridine
  modified_base (15)..(15): gm
  modified_base (16)..(16): 2'-deoxy-2'-fluoroguanosine
  modified_base (17)..(17): cm
  modified_base (18)..(18): 2'-deoxy-2'-fluorouridine
  modified_base (19)..(19): um
  modified_base (20)..(20): 2'-deoxy-2'-fluoroadenosine
  modified_base (21)..(21): um
  modified_base (22)..(22): 2'-deoxy-2'-fluoroadenosine
  misc_feature (22)..(23): 5'-phosphonothioate
  modified_base (23)..(23): 2'-O-methyladenosine
uguuuccagcugauggcuuauaa

SEQ ID NO: 6401 - RNA, 23 nt, Artificial Sequence
  siRNA antisense strand against b2GPI
  modified_base (1)..(1): 2'-deoxy-2'-fluorouridine
  modified_base (2)..(2): um
  misc_feature (2)..(3): 5'-phosphonothioate
  modified_base (3)..(3): 2'-deoxy-2'-fluoroguanosine
  modified_base (4)..(4): um
  modified_base (5)..(5): 2'-deoxy-2'-fluorouridine
  modified_base (6)..(6): um
  modified_base (7)..(7): 2'-deoxy-2'-fluorocytidine
  modified_base (8)..(8): cm
  modified_base (9)..(9): 2'-deoxy-2'-fluoroadenosine
  modified_base (10)..(10): gm
  modified_base (11)..(11): cm
  modified_base (12)..(12): 2'-deoxy-2'-fluorouridine
  modified_base (13)..(13): gm
  modified_base (14)..(14): 2'-deoxy-2'-fluoroadenosine
  modified_base (15)..(15): um
  modified_base (16)..(16): 2'-deoxy-2'-fluoroguanosine
  modified_base (17)..(17): gm
  modified_base (18)..(18): 2'-deoxy-2'-fluorocytidine
  modified_base (19)..(19): um
  modified_base (20)..(20): 2'-deoxy-2'-fluorouridine
  modified_base (21)..(21): 2'-O-methyladenosine
  modified_base (22)..(22): 2'-deoxy-2'-fluorouridine
  misc_feature (22)..(23): 5'-phosphonothioate
  modified_base (23)..(23): 2'-O-methyladenosine
uuguuuccagcugauggcuuaua

SEQ ID NO: 6402 - RNA, 23 nt, Artificial Sequence
  siRNA antisense strand against b2GPI
  modified_base (1)..(1): 2'-deoxy-2'-fluoroadenosine
  modified_base (2)..(2): um
  misc_feature (2)..(3): 5'-phosphonothioate
  modified_base (3)..(3): 2'-deoxy-2'-fluorouridine
  modified_base (4)..(4): gm
  modified_base (5)..(5): 2'-deoxy-2'-fluorouridine
  modified_base (6)..(6): um
  modified_base (7)..(7): 2'-deoxy-2'-fluorouridine
  modified_base (8)..(8): cm
  modified_base (9)..(9): 2'-deoxy-2'-fluorocytidine
  modified_base (10)..(10): 2'-O-methyladenosine
  modified_base (11)..(11): gm
  modified_base (12)..(12): 2'-deoxy-2'-fluorocytidine
  modified_base (13)..(13): um
  modified_base (14)..(14): 2'-deoxy-2'-fluoroguanosine
  modified_base (15)..(15): 2'-O-methyladenosine
  modified_base (16)..(16): 2'-deoxy-2'-fluorouridine
  modified_base (17)..(17): gm
  modified_base (18)..(18): 2'-deoxy-2'-fluoroguanosine
  modified_base (19)..(19): cm
  modified_base (20)..(20): 2'-deoxy-2'-fluorouridine
  modified_base (21)..(21): um
  modified_base (22)..(22): 2'-deoxy-2'-fluoroadenosine
  misc_feature (22)..(23): 5'-phosphonothioate
  modified_base (23)..(23): um
auuguuuccagcugauggcuuau

SEQ ID NO: 6403 - RNA, 23 nt, Artificial Sequence
  siRNA antisense strand against b2GPI
  modified_base (1)..(1): 2'-deoxy-2'-fluoroadenosine
  modified_base (2)..(2): 2'-O-methyladenosine
  misc_feature (2)..(3): 5'-phosphonothioate
  modified_base (3)..(3): 2'-deoxy-2'-fluorouridine
  modified_base (4)..(4): um
  modified_base (5)..(5): 2'-deoxy-2'-fluoroguanosine
  modified_base (6)..(6): um
  modified_base (7)..(7): 2'-deoxy-2'-fluorouridine
  modified_base (8)..(8): um
  modified_base (9)..(9): 2'-deoxy-2'-fluorocytidine
  modified_base (10)..(10): cm
  modified_base (11)..(11): 2'-O-methyladenosine
  modified_base (12)..(12): 2'-deoxy-2'-fluoroguanosine
  modified_base (13)..(13): cm
  modified_base (14)..(14): 2'-deoxy-2'-fluorouridine
  modified_base (15)..(15): gm
  modified_base (16)..(16): 2'-deoxy-2'-fluoroadenosine
  modified_base (17)..(17): um
  modified_base (18)..(18): 2'-deoxy-2'-fluoroguanosine
  modified_base (19)..(19): gm
  modified_base (20)..(20): 2'-deoxy-2'-fluorocytidine
  modified_base (21)..(21): um
  modified_base (22)..(22): 2'-deoxy-2'-fluorouridine
  misc_feature (22)..(23): 5'-phosphonothioate
  modified_base (23)..(23): 2'-O-methyladenosine
aauuguuuccagcugauggcuua

SEQ ID NO: 6404 - RNA, 23 nt, Artificial Sequence
  siRNA antisense strand against b2GPI
  modified_base (1)..(1): 2'-deoxy-2'-fluoroguanosine
  modified_base (2)..(2): 2'-O-methyladenosine
  misc_feature (2)..(3): 5'-phosphonothioate
  modified_base (3)..(3): 2'-deoxy-2'-fluoroadenosine
  modified_base (4)..(4): um
  modified_base (5)..(5): 2'-deoxy-2'-fluorouridine
  modified_base (6)..(6): gm
  modified_base (7)..(7): 2'-deoxy-2'-fluorouridine
  modified_base (8)..(8): um
  modified_base (9)..(9): 2'-deoxy-2'-fluorouridine
  modified_base (10)..(10): cm
  modified_base (11)..(11): cm
  modified_base (12)..(12): 2'-deoxy-2'-fluoroadenosine
  modified_base (13)..(13): gm
  modified_base (14)..(14): 2'-deoxy-2'-fluorocytidine
  modified_base (15)..(15): um
  modified_base (16)..(16): 2'-deoxy-2'-fluoroguanosine
  modified_base (17)..(17): 2'-O-methyladenosine
  modified_base (18)..(18): 2'-deoxy-2'-fluorouridine
  modified_base (19)..(19): gm
  modified_base (20)..(20): 2'-deoxy-2'-fluoroguanosine
  modified_base (21)..(21): cm
  modified_base (22)..(22): 2'-deoxy-2'-fluorouridine
  misc_feature (22)..(23): 5'-phosphonothioate
  modified_base (23)..(23): um
gaauuguuuccagcugauggcuu

SEQ ID NO: 6405 - RNA, 23 nt, Artificial Sequence
  siRNA antisense strand against b2GPI
  modified_base (1)..(1): 2'-deoxy-2'-fluoroguanosine
  modified_base (2)..(2): 2'-O-methyladenosine
  misc_feature (2)..(3): 5'-phosphonothioate
  modified_base (3)..(3): 2'-deoxy-2'-fluoroguanosine
  modified_base (4)..(4): gm
  modified_base (5)..(5): 2'-deoxy-2'-fluoroguanosine
  modified_base (6)..(6): 2'-O-methyladenosine
  modified_base (7)..(7): 2'-deoxy-2'-fluoroadenosine
  modified_base (8)..(8): um
  modified_base (9)..(9): 2'-deoxy-2'-fluorouridine
  modified_base (10)..(10): gm
  modified_base (11)..(11): um
  modified_base (12)..(12): 2'-deoxy-2'-fluorouridine
  modified_base (13)..(13): um
  modified_base (14)..(14): 2'-deoxy-2'-fluorocytidine
  modified_base (15)..(15): cm
  modified_base (16)..(16): 2'-deoxy-2'-fluoroadenosine
  modified_base (17)..(17): gm
  modified_base (18)..(18): 2'-deoxy-2'-fluorocytidine
  modified_base (19)..(19): um
  modified_base (20)..(20): 2'-deoxy-2'-fluoroguanosine
  modified_base (21)..(21): 2'-O-methyladenosine
  modified_base (22)..(22): 2'-deoxy-2'-fluorouridine
  misc_feature (22)..(23): 5'-phosphonothioate
  modified_base (23)..(23): gm
gagggaauuguuuccagcugaug

SEQ ID NO: 6406 - RNA, 23 nt, Artificial Sequence
  siRNA antisense strand against b2GPI
  modified_base (1)..(1): 2'-deoxy-2'-fluoroadenosine
  modified_base (2)..(2): gm
  misc_feature (2)..(3): 5'-phosphonothioate
  modified_base (3)..(3): 2'-deoxy-2'-fluoroadenosine
  modified_base (4)..(4): gm
  modified_base (5)..(5): 2'-deoxy-2'-fluoroguanosine
  modified_base (6)..(6): gm
  modified_base (7)..(7): 2'-deoxy-2'-fluoroadenosine
  modified_base (8)..(8): 2'-O-methyladenosine
  modified_base (9)..(9): 2'-deoxy-2'-fluorouridine
  modified_base (10)..(10): um
  modified_base (11)..(11): gm
  modified_base (12)..(12): 2'-deoxy-2'-fluorouridine
  modified_base (13)..(13): um
  modified_base (14)..(14): 2'-deoxy-2'-fluorouridine
  modified_base (15)..(15): cm
  modified_base (16)..(16): 2'-deoxy-2'-fluorocytidine
  modified_base (17)..(17): 2'-O-methyladenosine
  modified_base (18)..(18): 2'-deoxy-2'-fluoroguanosine
  modified_base (19)..(19): cm
  modified_base (20)..(20): 2'-deoxy-2'-fluorouridine
  modified_base (21)..(21): gm
  modified_base (22)..(22): 2'-deoxy-2'-fluoroadenosine
  misc_feature (22)..(23): 5'-phosphonothioate
  modified_base (23)..(23): um
agagggaauuguuuccagcugau

SEQ ID NO: 6407 - RNA, 23 nt, Artificial Sequence
  siRNA antisense strand against b2GPI
  modified_base (1)..(1): 2'-deoxy-2'-fluoroguanosine
  modified_base (2)..(2): 2'-O-methyladenosine
  misc_feature (2)..(3): 5'-phosphonothioate
  modified_base (3)..(3): 2'-deoxy-2'-fluorouridine
  modified_base (4)..(4): 2'-O-methyladenosine
  modified_base (5)..(5): 2'-deoxy-2'-fluoroguanosine
  modified_base (6)..(6): 2'-O-methyladenosine
  modified_base (7)..(7): 2'-deoxy-2'-fluoroguanosine
  modified_base (8)..(8): gm
  modified_base (9)..(9): 2'-deoxy-2'-fluoroguanosine
  modified_base (10)..(10): 2'-O-methyladenosine
  modified_base (11)..(11): 2'-O-methyladenosine
  modified_base (12)..(12): 2'-deoxy-2'-fluorouridine
  modified_base (13)..(13): um
  modified_base (14)..(14): 2'-deoxy-2'-fluoroguanosine
  modified_base (15)..(15): um
  modified_base (16)..(16): 2'-deoxy-2'-fluorouridine
  modified_base (17)..(17): um
  modified_base (18)..(18): 2'-deoxy-2'-fluorocytidine
  modified_base (19)..(19): cm
  modified_base (20)..(20): 2'-deoxy-2'-fluoroadenosine
  modified_base (21)..(21): gm
  modified_base (22)..(22): 2'-deoxy-2'-fluorocytidine
  misc_feature (22)..(23): 5'-phosphonothioate
  modified_base (23)..(23): um
gauagagggaauuguuuccagcu

SEQ ID NO: 6408 - RNA, 23 nt, Artificial Sequence
  siRNA antisense strand against b2GPI
  modified_base (1)..(1): 2'-deoxy-2'-fluorouridine
  modified_base (2)..(2): cm
  misc_feature (2)..(3): 5'-phosphonothioate
  modified_base (3)..(3): 2'-deoxy-2'-fluorocytidine
  modified_base (4)..(4): cm
  modified_base (5)..(5): 2'-deoxy-2'-fluoroguanosine
  modified_base (6)..(6): 2'-O-methyladenosine
  modified_base (7)..(7): 2'-deoxy-2'-fluorouridine
  modified_base (8)..(8): 2'-O-methyladenosine
  modified_base (9)..(9): 2'-deoxy-2'-fluoroguanosine
  modified_base (10)..(10): 2'-O-methyladenosine
  modified_base (11)..(11): gm
  modified_base (12)..(12): 2'-deoxy-2'-fluoroguanosine
  modified_base (13)..(13): gm
  modified_base (14)..(14): 2'-deoxy-2'-fluoroadenosine
  modified_base (15)..(15): 2'-O-methyladenosine
  modified_base (16)..(16): 2'-deoxy-2'-fluorouridine
  modified_base (17)..(17): um
  modified_base (18)..(18): 2'-deoxy-2'-fluoroguanosine
  modified_base (19)..(19): um
  modified_base (20)..(20): 2'-deoxy-2'-fluorouridine
  modified_base (21)..(21): um
  modified_base (22)..(22): 2'-deoxy-2'-fluorocytidine
  misc_feature (22)..(23): 5'-phosphonothioate
  modified_base (23)..(23): cm
ucccgauagagggaauuguuucc

SEQ ID NO: 6409 - RNA, 23 nt, Artificial Sequence
  siRNA antisense strand against b2GPI
  modified_base (1)..(1): 2'-deoxy-2'-fluorouridine
  modified_base (2)..(2): gm
  misc_feature (2)..(3): 5'-phosphonothioate
  modified_base (3)..(3): 2'-deoxy-2'-fluorocytidine
  modified_base (4)..(4): um
  modified_base (5)..(5): 2'-deoxy-2'-fluoroguanosine
  modified_base (6)..(6): um
  modified_base (7)..(7): 2'-deoxy-2'-fluoroguanosine
  modified_base (8)..(8): um
  modified_base (9)..(9): 2'-deoxy-2'-fluorocytidine
  modified_base (10)..(10): cm
  modified_base (11)..(11): cm
  modified_base (12)..(12): 2'-deoxy-2'-fluoroguanosine
  modified_base (13)..(13): 2'-O-methyladenosine
  modified_base (14)..(14): 2'-deoxy-2'-fluorouridine
  modified_base (15)..(15): 2'-O-methyladenosine
  modified_base (16)..(16): 2'-deoxy-2'-fluoroguanosine
  modified_base (17)..(17): 2'-O-methyladenosine
  modified_base (18)..(18): 2'-deoxy-2'-fluoroguanosine
  modified_base (19)..(19): gm
  modified_base (20)..(20): 2'-deoxy-2'-fluoroguanosine
  modified_base (21)..(21): 2'-O-methyladenosine
  modified_base (22)..(22): 2'-deoxy-2'-fluoroadenosine
  misc_feature (22)..(23): 5'-phosphonothioate
  modified_base (23)..(23): um
ugcugugucccgauagagggaau

SEQ ID NO: 6410 - RNA, 23 nt, Artificial Sequence
  siRNA antisense strand against b2GPI
  modified_base (1)..(1): 2'-deoxy-2'-fluoroadenosine
  modified_base (2)..(2): 2'-O-methyladenosine
  misc_feature (2)..(3): 5'-phosphonothioate
  modified_base (3)..(3): 2'-deoxy-2'-fluorocytidine
  modified_base (4)..(4): um
  modified_base (5)..(5): 2'-deoxy-2'-fluoroguanosine
  modified_base (6)..(6): cm
  modified_base (7)..(7): 2'-deoxy-2'-fluorouridine
  modified_base (8)..(8): gm
  modified_base (9)..(9): 2'-deoxy-2'-fluorouridine
  modified_base (10)..(10): gm
  modified_base (11)..(11): um
  modified_base (12)..(12): 2'-deoxy-2'-fluorocytidine
  modified_base (13)..(13): cm
  modified_base (14)..(14): 2'-deoxy-2'-fluorocytidine
  modified_base (15)..(15): gm
  modified_base (16)..(16): 2'-deoxy-2'-fluoroadenosine
  modified_base (17)..(17): um
  modified_base (18)..(18): 2'-deoxy-2'-fluoroadenosine
  modified_base (19)..(19): gm
  modified_base (20)..(20): 2'-deoxy-2'-fluoroadenosine
  modified_base (21)..(21): gm
  modified_base (22)..(22): 2'-deoxy-2'-fluoroguanosine
  misc_feature (22)..(23): 5'-phosphonothioate
  modified_base (23)..(23): gm
aacugcugugucccgauagaggg

SEQ ID NO: 6411 - RNA, 23 nt, Artificial Sequence
  siRNA antisense strand against b2GPI
  modified_base (1)..(1): 2'-deoxy-2'-fluoroadenosine
  modified_base (2)..(2): 2'-O-methyladenosine
  misc_feature (2)..(3): 5'-phosphonothioate
  modified_base (3)..(3): 2'-deoxy-2'-fluoroadenosine
  modified_base (4)..(4): cm
  modified_base (5)..(5): 2'-deoxy-2'-fluorouridine
  modified_base (6)..(6): gm
  modified_base (7)..(7): 2'-deoxy-2'-fluorocytidine
  modified_base (8)..(8): um
  modified_base (9)..(9): 2'-deoxy-2'-fluoroguanosine
  modified_base (10)..(10): um
  modified_base (11)..(11): gm
  modified_base (12)..(12): 2'-deoxy-2'-fluorouridine
  modified_base (13)..(13): cm
  modified_base (14)..(14): 2'-deoxy-2'-fluorocytidine
  modified_base (15)..(15): cm
  modified_base (16)..(16): 2'-deoxy-2'-fluoroguanosine
  modified_base (17)..(17): 2'-O-methyladenosine
  modified_base (18)..(18): 2'-deoxy-2'-fluorouridine
  modified_base (19)..(19): 2'-O-methyladenosine
  modified_base (20)..(20): 2'-deoxy-2'-fluoroguanosine
  modified_base (21)..(21): 2'-O-methyladenosine
  modified_base (22)..(22): 2'-deoxy-2'-fluoroguanosine
  misc_feature (22)..(23): 5'-phosphonothioate
  modified_base (23)..(23): gm
aaacugcugugucccgauagagg

SEQ ID NO: 6412 - RNA, 23 nt, Artificial Sequence
  siRNA antisense strand against b2GPI
  modified_base (1)..(1): 2'-deoxy-2'-fluoroadenosine
  modified_base (2)..(2): 2'-O-methyladenosine
  misc_feature (2)..(3): 5'-phosphonothioate
  modified_base (3)..(3): 2'-deoxy-2'-fluoroadenosine
  modified_base (4)..(4): 2'-O-methyladenosine
  modified_base (5)..(5): 2'-deoxy-2'-fluorocytidine
  modified_base (6)..(6): um
  modified_base (7)..(7): 2'-deoxy-2'-fluoroguanosine
  modified_base (8)..(8): cm
  modified_base (9)..(9): 2'-deoxy-2'-fluorouridine
  modified_base (10)..(10): gm
  modified_base (11)..(11): um
  modified_base (12)..(12): 2'-deoxy-2'-fluoroguanosine
  modified_base (13)..(13): um
  modified_base (14)..(14): 2'-deoxy-2'-fluorocytidine
  modified_base (15)..(15): cm
  modified_base (16)..(16): 2'-deoxy-2'-fluorocytidine
  modified_base (17)..(17): gm
  modified_base (18)..(18): 2'-deoxy-2'-fluoroadenosine
  modified_base (19)..(19): um
  modified_base (20)..(20): 2'-deoxy-2'-fluoroadenosine
  modified_base (21)..(21): gm
  modified_base (22)..(22): 2'-deoxy-2'-fluoroadenosine
  misc_feature (22)..(23): 5'-phosphonothioate
  modified_base (23)..(23): gm
aaaacugcugugucccgauagag

SEQ ID NO: 6413 - RNA, 23 nt, Artificial Sequence
  siRNA antisense strand against b2GPI
  modified_base (1)..(1): 2'-deoxy-2'-fluoroadenosine
  modified_base (2)..(2): 2'-O-methyladenosine
  misc_feature (2)..(3): 5'-phosphonothioate
  modified_base (3)..(3): 2'-deoxy-2'-fluoroadenosine
  modified_base (4)..(4): 2'-O-methyladenosine
  modified_base (5)..(5): 2'-deoxy-2'-fluoroadenosine
  modified_base (6)..(6): cm
  modified_base (7)..(7): 2'-deoxy-2'-fluorouridine
  modified_base (8)..(8): gm
  modified_base (9)..(9): 2'-deoxy-2'-fluorocytidine
  modified_base (10)..(10): um
  modified_base (11)..(11): gm
  modified_base (12)..(12): 2'-deoxy-2'-fluorouridine
  modified_base (13)..(13): gm
  modified_base (14)..(14): 2'-deoxy-2'-fluorouridine
  modified_base (15)..(15): cm
  modified_base (16)..(16): 2'-deoxy-2'-fluorocytidine
  modified_base (17)..(17): cm
  modified_base (18)..(18): 2'-deoxy-2'-fluoroguanosine
  modified_base (19)..(19): 2'-O-methyladenosine
  modified_base (20)..(20): 2'-deoxy-2'-fluorouridine
  modified_base (21)..(21): 2'-O-methyladenosine
  modified_base (22)..(22): 2'-deoxy-2'-fluoroguanosine
  misc_feature (22)..(23): 5'-phosphonothioate
  modified_base (23)..(23): 2'-O-methyladenosine
aaaaacugcugugucccgauaga

SEQ ID NO: 6414 - RNA, 23 nt, Artificial Sequence
  siRNA antisense strand against b2GPI
  modified_base (1)..(1): 2'-deoxy-2'-fluorouridine
  modified_base (2)..(2): cm
  misc_feature (2)..(3): 5'-phosphonothioate
  modified_base (3)..(3): 2'-deoxy-2'-fluoroadenosine
  modified_base (4)..(4): 2'-O-methyladenosine
  modified_base (5)..(5): 2'-deoxy-2'-fluoroadenosine
  modified_base (6)..(6): 2'-O-methyladenosine
  modified_base (7)..(7): 2'-deoxy-2'-fluoroadenosine
  modified_base (8)..(8): cm
  modified_base (9)..(9): 2'-deoxy-2'-fluorouridine
  modified_base (10)..(10): gm
  modified_base (11)..(11): cm
  modified_base (12)..(12): 2'-deoxy-2'-fluorouridine
  modified_base (13)..(13): gm
  modified_base (14)..(14): 2'-deoxy-2'-fluorouridine
  modified_base (15)..(15): gm
  modified_base (16)..(16): 2'-deoxy-2'-fluorouridine
  modified_base (17)..(17): cm
  modified_base (18)..(18): 2'-deoxy-2'-fluorocytidine
  modified_base (19)..(19): cm
  modified_base (20)..(20): 2'-deoxy-2'-fluoroguanosine
  modified_base (21)..(21): 2'-O-methyladenosine
  modified_base (22)..(22): 2'-deoxy-2'-fluorouridine
  misc_feature (22)..(23): 5'-phosphonothioate
  modified_base (23)..(23): 2'-O-methyladenosine
ucaaaaacugcugugucccgaua

SEQ ID NO: 6415 - RNA, 23 nt, Artificial Sequence
  siRNA antisense strand against b2GPI
  modified_base (1)..(1): 2'-deoxy-2'-fluorouridine
  modified_base (2)..(2): um
  misc_feature (2)..(3): 5'-phosphonothioate
  modified_base (3)..(3): 2'-deoxy-2'-fluorocytidine
  modified_base (4)..(4): 2'-O-methyladenosine
  modified_base (5)..(5): 2'-deoxy-2'-fluoroadenosine
  modified_base (6)..(6): 2'-O-methyladenosine
  modified_base (7)..(7): 2'-deoxy-2'-fluoroadenosine
  modified_base (8)..(8): 2'-O-methyladenosine
  modified_base (9)..(9): 2'-deoxy-2'-fluorocytidine
  modified_base (10)..(10): um
  modified_base (11)..(11): gm
  modified_base (12)..(12): 2'-deoxy-2'-fluorocytidine
  modified_base (13)..(13): um
  modified_base (14)..(14): 2'-deoxy-2'-fluoroguanosine
  modified_base (15)..(15): um
  modified_base (16)..(16): 2'-deoxy-2'-fluoroguanosine
  modified_base (17)..(17): um
  modified_base (18)..(18): 2'-deoxy-2'-fluorocytidine
  modified_base (19)..(19): cm
  modified_base (20)..(20): 2'-deoxy-2'-fluorocytidine
  modified_base (21)..(21): gm
  modified_base (22)..(22): 2'-deoxy-2'-fluoroadenosine
  misc_feature (22)..(23): 5'-phosphonothioate
  modified_base (23)..(23): um
uucaaaaacugcugugucccgau

SEQ ID NO: 6416 - RNA, 23 nt, Artificial Sequence
  siRNA antisense strand against b2GPI
  modified_base (1)..(1): 2'-deoxy-2'-fluoroadenosine
  modified_base (2)..(2): um
  misc_feature (2)..(3): 5'-phosphonothioate
  modified_base (3)..(3): 2'-deoxy-2'-fluorouridine
  modified_base (4)..(4): cm
  modified_base (5)..(5): 2'-deoxy-2'-fluoroadenosine
  modified_base (6)..(6): 2'-O-methyladenosine
  modified_base (7)..(7): 2'-deoxy-2'-fluoroadenosine
  modified_base (8)..(8): 2'-O-methyladenosine
  modified_base (9)..(9): 2'-deoxy-2'-fluoroadenosine
  modified_base (10)..(10): cm
  modified_base (11)..(11): um
  modified_base (12)..(12): 2'-deoxy-2'-fluoroguanosine
  modified_base (13)..(13): cm
  modified_base (14)..(14): 2'-deoxy-2'-fluorouridine
  modified_base (15)..(15): gm
  modified_base (16)..(16): 2'-deoxy-2'-fluorouridine
  modified_base (17)..(17): gm
  modified_base (18)..(18): 2'-deoxy-2'-fluorouridine
  modified_base (19)..(19): cm
  modified_base (20)..(20): 2'-deoxy-2'-fluorocytidine
  modified_base (21)..(21): cm
  modified_base (22)..(22): 2'-deoxy-2'-fluoroguanosine
  misc_feature (22)..(23): 5'-phosphonothioate
  modified_base (23)..(23): 2'-O-methyladenosine
auucaaaaacugcugugucccga

SEQ ID NO: 6417 - RNA, 23 nt, Artificial Sequence
  siRNA antisense strand against b2GPI
  modified_base (1)..(1): 2'-deoxy-2'-fluoroadenosine
  modified_base (2)..(2): cm
  misc_feature (2)..(3): 5'-phosphonothioate
  modified_base (3)..(3): 2'-deoxy-2'-fluoroadenosine
  modified_base (4)..(4): um
  modified_base (5)..(5): 2'-deoxy-2'-fluorouridine
  modified_base (6)..(6): cm
  modified_base (7)..(7): 2'-deoxy-2'-fluoroadenosine
  modified_base (8)..(8): 2'-O-methyladenosine
  modified_base (9)..(9): 2'-deoxy-2'-fluoroadenosine
  modified_base (10)..(10): 2'-O-methyladenosine
  modified_base (11)..(11): 2'-O-methyladenosine
  modified_base (12)..(12): 2'-deoxy-2'-fluorocytidine
  modified_base (13)..(13): um
  modified_base (14)..(14): 2'-deoxy-2'-fluoroguanosine
  modified_base (15)..(15): cm
  modified_base (16)..(16): 2'-deoxy-2'-fluorouridine
  modified_base (17)..(17): gm
  modified_base (18)..(18): 2'-deoxy-2'-fluorouridine
  modified_base (19)..(19): gm
  modified_base (20)..(20): 2'-deoxy-2'-fluorouridine
  modified_base (21)..(21): cm
  modified_base (22)..(22): 2'-deoxy-2'-fluorocytidine
  misc_feature (22)..(23): 5'-phosphonothioate
  modified_base (23)..(23): cm
acauucaaaaacugcuguguccc

SEQ ID NO: 6418 - RNA, 23 nt, Artificial Sequence
  siRNA antisense strand against b2GPI
  modified_base (1)..(1): 2'-deoxy-2'-fluoroadenosine
  modified_base (2)..(2): 2'-O-methyladenosine
  misc_feature (2)..(3): 5'-phosphonothioate
  modified_base (3)..(3): 2'-deoxy-2'-fluorocytidine
  modified_base (4)..(4): 2'-O-methyladenosine
  modified_base (5)..(5): 2'-deoxy-2'-fluorouridine
  modified_base (6)..(6): um
  modified_base (7)..(7): 2'-deoxy-2'-fluorocytidine
  modified_base (8)..(8): 2'-O-methyladenosine
  modified_base (9)..(9): 2'-deoxy-2'-fluoroadenosine
  modified_base (10)..(10): 2'-O-methyladenosine
  modified_base (11)..(11): 2'-O-methyladenosine
  modified_base (12)..(12): 2'-deoxy-2'-fluoroadenosine
  modified_base (13)..(13): cm
  modified_base (14)..(14): 2'-deoxy-2'-fluorouridine
  modified_base (15)..(15): gm
  modified_base (16)..(16): 2'-deoxy-2'-fluorocytidine
  modified_base (17)..(17): um
  modified_base (18)..(18): 2'-deoxy-2'-fluoroguanosine
  modified_base (19)..(19): um
  modified_base (20)..(20): 2'-deoxy-2'-fluoroguanosine
  modified_base (21)..(21): um
  modified_base (22)..(22): 2'-deoxy-2'-fluorocytidine
  misc_feature (22)..(23): 5'-phosphonothioate
  modified_base (23)..(23): cm
aacauucaaaaacugcugugucc

SEQ ID NO: 6419 - RNA, 23 nt, Artificial Sequence
  siRNA antisense strand against b2GPI
  modified_base (1)..(1): 2'-deoxy-2'-fluoroadenosine
  modified_base (2)..(2): 2'-O-methyladenosine
  misc_feature (2)..(3): 5'-phosphonothioate
  modified_base (3)..(3): 2'-deoxy-2'-fluoroadenosine
  modified_base (4)..(4): cm
  modified_base (5)..(5): 2'-deoxy-2'-fluoroadenosine
  modified_base (6)..(6): um
  modified_base (7)..(7): 2'-deoxy-2'-fluorouridine
  modified_base (8)..(8): cm
  modified_base (9)..(9): 2'-deoxy-2'-fluoroadenosine
  modified_base (10)..(10): 2'-O-methyladenosine
  modified_base (11)..(11): 2'-O-methyladenosine
  modified_base (12)..(12): 2'-deoxy-2'-fluoroadenosine
  modified_base (13)..(13): 2'-O-methyladenosine
  modified_base (14)..(14): 2'-deoxy-2'-fluorocytidine
  modified_base (15)..(15): um
  modified_base (16)..(16): 2'-deoxy-2'-fluoroguanosine
  modified_base (17)..(17): cm
  modified_base (18)..(18): 2'-deoxy-2'-fluorouridine
  modified_base (19)..(19): gm
  modified_base (20)..(20): 2'-deoxy-2'-fluorouridine
  modified_base (21)..(21): gm
  modified_base (22)..(22): 2'-deoxy-2'-fluorouridine
  misc_feature (22)..(23): 5'-phosphonothioate
  modified_base (23)..(23): cm
aaacauucaaaaacugcuguguc

SEQ ID NO: 6420 - RNA, 23 nt, Artificial Sequence
  siRNA antisense strand against b2GPI
  modified_base (1)..(1): 2'-deoxy-2'-fluorocytidine
  modified_base (2)..(2): 2'-O-methyladenosine
  misc_feature (2)..(3): 5'-phosphonothioate
  modified_base (3)..(3): 2'-deoxy-2'-fluoroadenosine
  modified_base (4)..(4): 2'-O-methyladenosine
  modified_base (5)..(5): 2'-deoxy-2'-fluorocytidine
  modified_base (6)..(6): 2'-O-methyladenosine
  modified_base (7)..(7): 2'-deoxy-2'-fluorouridine
  modified_base (8)..(8): um
  modified_base (9)..(9): 2'-deoxy-2'-fluorocytidine
  modified_base (10)..(10): 2'-O-methyladenosine
  modified_base (11)..(11): 2'-O-methyladenosine
  modified_base (12)..(12): 2'-deoxy-2'-fluoroadenosine
  modified_base (13)..(13): 2'-O-methyladenosine
  modified_base (14)..(14): 2'-deoxy-2'-fluoroadenosine
  modified_base (15)..(15): cm
  modified_base (16)..(16): 2'-deoxy-2'-fluorouridine
  modified_base (17)..(17): gm
  modified_base (18)..(18): 2'-deoxy-2'-fluorocytidine
  modified_base (19)..(19): um
  modified_base (20)..(20): 2'-deoxy-2'-fluoroguanosine
  modified_base (21)..(21): um
  modified_base (22)..(22): 2'-deoxy-2'-fluoroguanosine
  misc_feature (22)..(23): 5'-phosphonothioate
  modified_base (23)..(23): um
caaacauucaaaaacugcugugu

SEQ ID NO: 6421 - RNA, 23 nt, Artificial Sequence
  siRNA antisense strand against b2GPI
  modified_base (1)..(1): 2'-deoxy-2'-fluoroguanosine
  modified_base (2)..(2): cm
  misc_feature (2)..(3): 5'-phosphonothioate
  modified_base (3)..(3): 2'-deoxy-2'-fluoroadenosine
  modified_base (4)..(4): 2'-O-methyladenosine
  modified_base (5)..(5): 2'-deoxy-2'-fluoroadenosine
  modified_base (6)..(6): cm
  modified_base (7)..(7): 2'-deoxy-2'-fluoroadenosine
  modified_base (8)..(8): um
  modified_base (9)..(9): 2'-deoxy-2'-fluorouridine
  modified_base (10)..(10): cm
  modified_base (11)..(11): 2'-O-methyladenosine
  modified_base (12)..(12): 2'-deoxy-2'-fluoroadenosine
  modified_base (13)..(13): 2'-O-methyladenosine
  modified_base (14)..(14): 2'-deoxy-2'-fluoroadenosine
  modified_base (15)..(15): 2'-O-methyladenosine
  modified_base (16)..(16): 2'-deoxy-2'-fluorocytidine
  modified_base (17)..(17): um
  modified_base (18)..(18): 2'-deoxy-2'-fluoroguanosine
  modified_base (19)..(19): cm
  modified_base (20)..(20): 2'-deoxy-2'-fluorouridine
  modified_base (21)..(21): gm
  modified_base (22)..(22): 2'-deoxy-2'-fluorouridine
  misc_feature (22)..(23): 5'-phosphonothioate
  modified_base (23)..(23): gm
gcaaacauucaaaaacugcugug

SEQ ID NO: 6422 - RNA, 23 nt, Artificial Sequence
  siRNA antisense strand against b2GPI
  modified_base (1)..(1): 2'-deoxy-2'-fluorouridine
  modified_base (2)..(2): gm
  misc_feature (2)..(3): 5'-phosphonothioate
  modified_base (3)..(3): 2'-deoxy-2'-fluoroguanosine
  modified_base (4)..(4): cm
  modified_base (5)..(5): 2'-deoxy-2'-fluoroadenosine
  modified_base (6)..(6): 2'-O-methyladenosine
  modified_base (7)..(7): 2'-deoxy-2'-fluoroadenosine
  modified_base (8)..(8): cm
  modified_base (9)..(9): 2'-deoxy-2'-fluoroadenosine
  modified_base (10)..(10): um
  modified_base (11)..(11): um
  modified_base (12)..(12): 2'-deoxy-2'-fluorocytidine
  modified_base (13)..(13): 2'-O-methyladenosine
  modified_base (14)..(14): 2'-deoxy-2'-fluoroadenosine
  modified_base (15)..(15): 2'-O-methyladenosine
  modified_base (16)..(16): 2'-deoxy-2'-fluoroadenosine
  modified_base (17)..(17): 2'-O-methyladenosine
  modified_base (18)..(18): 2'-deoxy-2'-fluorocytidine
  modified_base (19)..(19): um
  modified_base (20)..(20): 2'-deoxy-2'-fluoroguanosine
  modified_base (21)..(21): cm
  modified_base (22)..(22): 2'-deoxy-2'-fluorouridine
  misc_feature (22)..(23): 5'-phosphonothioate
  modified_base (23)..(23): gm
uggcaaacauucaaaaacugcug

SEQ ID NO: 6423 - RNA, 23 nt, Artificial Sequence
  siRNA antisense strand against b2GPI
  modified_base (1)..(1): 2'-deoxy-2'-fluoroguanosine
  modified_base (2)..(2): um
  misc_feature (2)..(3): 5'-phosphonothioate
  modified_base (3)..(3): 2'-deoxy-2'-fluoroguanosine
  modified_base (4)..(4): gm
  modified_base (5)..(5): 2'-deoxy-2'-fluorocytidine
  modified_base (6)..(6): 2'-O-methyladenosine
  modified_base (7)..(7): 2'-deoxy-2'-fluoroadenosine
  modified_base (8)..(8): 2'-O-methyladenosine
  modified_base (9)..(9): 2'-deoxy-2'-fluorocytidine
  modified_base (10)..(10): 2'-O-methyladenosine
  modified_base (11)..(11): um
  modified_base (12)..(12): 2'-deoxy-2'-fluorouridine
  modified_base (13)..(13): cm
  modified_base (14)..(14): 2'-deoxy-2'-fluoroadenosine
  modified_base (15)..(15): 2'-O-methyladenosine
  modified_base (16)..(16): 2'-deoxy-2'-fluoroadenosine
  modified_base (17)..(17): 2'-O-methyladenosine
  modified_base (18)..(18): 2'-deoxy-2'-fluoroadenosine
  modified_base (19)..(19): cm
  modified_base (20)..(20): 2'-deoxy-2'-fluorouridine
  modified_base (21)..(21): gm
  modified_base (22)..(22): 2'-deoxy-2'-fluorocytidine
  misc_feature (22)..(23): 5'-phosphonothioate
  modified_base (23)..(23): um
guggcaaacauucaaaaacugcu

SEQ ID NO: 6424 - RNA, 23 nt, Artificial Sequence
  siRNA antisense strand against b2GPI
  modified_base (1)..(1): 2'-deoxy-2'-fluorouridine
  modified_base (2)..(2): um
  misc_feature (2)..(3): 5'-phosphonothioate
  modified_base (3)..(3): 2'-deoxy-2'-fluoroguanosine
  modified_base (4)..(4): um
  modified_base (5)..(5): 2'-deoxy-2'-fluoroguanosine
  modified_base (6)..(6): gm
  modified_base (7)..(7): 2'-deoxy-2'-fluorocytidine
  modified_base (8)..(8): 2'-O-methyladenosine
  modified_base (9)..(9): 2'-deoxy-2'-fluoroadenosine
  modified_base (10)..(10): 2'-O-methyladenosine
  modified_base (11)..(11): cm
  modified_base (12)..(12): 2'-deoxy-2'-fluoroadenosine
  modified_base (13)..(13): um
  modified_base (14)..(14): 2'-deoxy-2'-fluorouridine
  modified_base (15)..(15): cm
  modified_base (16)..(16): 2'-deoxy-2'-fluoroadenosine
  modified_base (17)..(17): 2'-O-methyladenosine
  modified_base (18)..(18): 2'-deoxy-2'-fluoroadenosine
  modified_base (19)..(19): 2'-O-methyladenosine
  modified_base (20)..(20): 2'-deoxy-2'-fluoroadenosine
  modified_base (21)..(21): cm
  modified_base (22)..(22): 2'-deoxy-2'-fluorouridine
  misc_feature (22)..(23): 5'-phosphonothioate
  modified_base (23)..(23): gm
uuguggcaaacauucaaaaacug

SEQ ID NO: 6425 - RNA, 23 nt, Artificial Sequence
  siRNA antisense strand against b2GPI
  modified_base (1)..(1): 2'-deoxy-2'-fluorouridine
  modified_base (2)..(2): gm
  misc_feature (2)..(3): 5'-phosphonothioate
  modified_base (3)..(3): 2'-deoxy-2'-fluorouridine
  modified_base (4)..(4): um
  modified_base (5)..(5): 2'-deoxy-2'-fluoroguanosine
  modified_base (6)..(6): um
  modified_base (7)..(7): 2'-deoxy-2'-fluoroguanosine
  modified_base (8)..(8): gm
  modified_base (9)..(9): 2'-deoxy-2'-fluorocytidine
  modified_base (10)..(10): 2'-O-methyladenosine
  modified_base (11)..(11): 2'-O-methyladenosine
  modified_base (12)..(12): 2'-deoxy-2'-fluoroadenosine
  modified_base (13)..(13): cm
  modified_base (14)..(14): 2'-deoxy-2'-fluoroadenosine
  modified_base (15)..(15): um
  modified_base (16)..(16): 2'-deoxy-2'-fluorouridine
  modified_base (17)..(17): cm
  modified_base (18)..(18): 2'-deoxy-2'-fluoroadenosine
  modified_base (19)..(19): 2'-O-methyladenosine
  modified_base (20)..(20): 2'-deoxy-2'-fluoroadenosine
  modified_base (21)..(21): 2'-O-methyladenosine
  modified_base (22)..(22): 2'-deoxy-2'-fluoroadenosine
  misc_feature (22)..(23): 5'-phosphonothioate
  modified_base (23)..(23): cm
uguuguggcaaacauucaaaaac

SEQ ID NO: 6426 - RNA, 23 nt, Artificial Sequence
  siRNA antisense strand against b2GPI
  modified_base (1)..(1): 2'-deoxy-2'-fluoroadenosine
  modified_base (2)..(2): um
  misc_feature (2)..(3): 5'-phosphonothioate
  modified_base (3)..(3): 2'-deoxy-2'-fluoroguanosine
  modified_base (4)..(4): um
  modified_base (5)..(5): 2'-deoxy-2'-fluorouridine
  modified_base (6)..(6): gm
  modified_base (7)..(7): 2'-deoxy-2'-fluorouridine
  modified_base (8)..(8): gm
  modified_base (9)..(9): 2'-deoxy-2'-fluoroguanosine
  modified_base (10)..(10): cm
  modified_base (11)..(11): 2'-O-methyladenosine
  modified_base (12)..(12): 2'-deoxy-2'-fluoroadenosine
  modified_base (13)..(13): 2'-O-methyladenosine
  modified_base (14)..(14): 2'-deoxy-2'-fluorocytidine
  modified_base (15)..(15): 2'-O-methyladenosine
  modified_base (16)..(16): 2'-deoxy-2'-fluorouridine
  modified_base (17)..(17): um
  modified_base (18)..(18): 2'-deoxy-2'-fluorocytidine
  modified_base (19)..(19): 2'-O-methyladenosine
  modified_base (20)..(20): 2'-deoxy-2'-fluoroadenosine
  modified_base (21)..(21): 2'-O-methyladenosine
  modified_base (22)..(22): 2'-deoxy-2'-fluoroadenosine
  misc_feature (22)..(23): 5'-phosphonothioate
  modified_base (23)..(23): 2'-O-methyladenosine
auguuguggcaaacauucaaaaa

SEQ ID NO: 6427 - RNA, 23 nt, Artificial Sequence
  siRNA antisense strand against b2GPI
  modified_base (1)..(1): 2'-deoxy-2'-fluorocytidine
  modified_base (2)..(2): 2'-O-methyladenosine
  misc_feature (2)..(3): 5'-phosphonothioate
  modified_base (3)..(3): 2'-deoxy-2'-fluorouridine
  modified_base (4)..(4): gm
  modified_base (5)..(5): 2'-deoxy-2'-fluorouridine
  modified_base (6)..(6): um
  modified_base (7)..(7): 2'-deoxy-2'-fluoroguanosine
  modified_base (8)..(8): um
  modified_base (9)..(9): 2'-deoxy-2'-fluoroguanosine
  modified_base (10)..(10): gm
  modified_base (11)..(11): cm
  modified_base (12)..(12): 2'-deoxy-2'-fluoroadenosine
  modified_base (13)..(13): 2'-O-methyladenosine
  modified_base (14)..(14): 2'-deoxy-2'-fluoroadenosine
  modified_base (15)..(15): cm
  modified_base (16)..(16): 2'-deoxy-2'-fluoroadenosine
  modified_base (17)..(17): um
  modified_base (18)..(18): 2'-deoxy-2'-fluorouridine
  modified_base (19)..(19): cm
  modified_base (20)..(20): 2'-deoxy-2'-fluoroadenosine
  modified_base (21)..(21): 2'-O-methyladenosine
  modified_base (22)..(22): 2'-deoxy-2'-fluoroadenosine
  misc_feature (22)..(23): 5'-phosphonothioate
  modified_base (23)..(23): 2'-O-methyladenosine
cauguuguggcaaacauucaaaa

SEQ ID NO: 6428 - RNA, 23 nt, Artificial Sequence
  siRNA antisense strand against b2GPI
  modified_base (1)..(1): 2'-deoxy-2'-fluoroadenosine
  modified_base (2)..(2): um
  misc_feature (2)..(3): 5'-phosphonothioate
  modified_base (3)..(3): 2'-deoxy-2'-fluorocytidine
  modified_base (4)..(4): gm
  modified_base (5)..(5): 2'-deoxy-2'-fluorocytidine
  modified_base (6)..(6): 2'-O-methyladenosine
  modified_base (7)..(7): 2'-deoxy-2'-fluorouridine
  modified_base (8)..(8): gm
  modified_base (9)..(9): 2'-deoxy-2'-fluorouridine
  modified_base (10)..(10): um
  modified_base (11)..(11): gm
  modified_base (12)..(12): 2'-deoxy-2'-fluorouridine
  modified_base (13)..(13): gm
  modified_base (14)..(14): 2'-deoxy-2'-fluoroguanosine
  modified_base (15)..(15): cm
  modified_base (16)..(16): 2'-deoxy-2'-fluoroadenosine
  modified_base (17)..(17): 2'-O-methyladenosine
  modified_base (18)..(18): 2'-deoxy-2'-fluoroadenosine
  modified_base (19)..(19): cm
  modified_base (20)..(20): 2'-deoxy-2'-fluoroadenosine
  modified_base (21)..(21): um
  modified_base (22)..(22): 2'-deoxy-2'-fluorouridine
  misc_feature (22)..(23): 5'-phosphonothioate
  modified_base (23)..(23): cm
aucgcauguuguggcaaacauuc

SEQ ID NO: 6429 - RNA, 23 nt, Artificial Sequence
  siRNA antisense strand against b2GPI
  modified_base (1)..(1): 2'-deoxy-2'-fluoroadenosine
  modified_base (2)..(2): 2'-O-methyladenosine
  misc_feature (2)..(3): 5'-phosphonothioate
  modified_base (3)..(3): 2'-deoxy-2'-fluoroadenosine
  modified_base (4)..(4): cm
  modified_base (5)..(5): 2'-deoxy-2'-fluoroadenosine
  modified_base (6)..(6): um
  modified_base (7)..(7): 2'-deoxy-2'-fluorocytidine
  modified_base (8)..(8): gm
  modified_base (9)..(9): 2'-deoxy-2'-fluorocytidine
  modified_base (10)..(10): 2'-O-methyladenosine
  modified_base (11)..(11): um
  modified_base (12)..(12): 2'-deoxy-2'-fluoroguanosine
  modified_base (13)..(13): um
  modified_base (14)..(14): 2'-deoxy-2'-fluorouridine
  modified_base (15)..(15): gm
  modified_base (16)..(16): 2'-deoxy-2'-fluorouridine
  modified_base (17)..(17): gm
  modified_base (18)..(18): 2'-deoxy-2'-fluoroguanosine
  modified_base (19)..(19): cm
  modified_base (20)..(20): 2'-deoxy-2'-fluoroadenosine
  modified_base (21)..(21): 2'-O-methyladenosine
  modified_base (22)..(22): 2'-deoxy-2'-fluoroadenosine
  misc_feature (22)..(23): 5'-phosphonothioate
  modified_base (23)..(23): cm
aaacaucgcauguuguggcaaac

SEQ ID NO: 6430 - RNA, 23 nt, Artificial Sequence
  siRNA antisense strand against b2GPI
  modified_base (1)..(1): 2'-deoxy-2'-fluorocytidine
  modified_base (2)..(2): 2'-O-methyladenosine
  misc_feature (2)..(3): 5'-phosphonothioate
  modified_base (3)..(3): 2'-deoxy-2'-fluoroadenosine
  modified_base (4)..(4): 2'-O-methyladenosine
  modified_base (5)..(5): 2'-deoxy-2'-fluorocytidine
  modified_base (6)..(6): 2'-O-methyladenosine
  modified_base (7)..(7): 2'-deoxy-2'-fluorouridine
  modified_base (8)..(8): cm
  modified_base (9)..(9): 2'-deoxy-2'-fluoroguanosine
  modified_base (10)..(10): cm
  modified_base (11)..(11): 2'-O-methyladenosine
  modified_base (12)..(12): 2'-deoxy-2'-fluorouridine
  modified_base (13)..(13): gm
  modified_base (14)..(14): 2'-deoxy-2'-fluorouridine
  modified_base (15)..(15): um
  modified_base (16)..(16): 2'-deoxy-2'-fluoroguanosine
  modified_base (17)..(17): um
  modified_base (18)..(18): 2'-deoxy-2'-fluoroguanosine
  modified_base (19)..(19): gm
  modified_base (20)..(20): 2'-deoxy-2'-fluorocytidine
  modified_base (21)..(21): 2'-O-methyladenosine
  modified_base (22)..(22): 2'-deoxy-2'-fluoroadenosine
  misc_feature (22)..(23): 5'-phosphonothioate
  modified_base (23)..(23): 2'-O-methyladenosine
caaacaucgcauguuguggcaaa

SEQ ID NO: 6431 - RNA, 23 nt, Artificial Sequence
  siRNA antisense strand against b2GPI
  modified_base (1)..(1): 2'-deoxy-2'-fluorouridine
  modified_base (2)..(2): cm
  misc_feature (2)..(3): 5'-phosphonothioate
  modified_base (3)..(3): 2'-deoxy-2'-fluorocytidine
  modified_base (4)..(4): 2'-O-methyladenosine
  modified_base (5)..(5): 2'-deoxy-2'-fluoroadenosine
  modified_base (6)..(6): 2'-O-methyladenosine
  modified_base (7)..(7): 2'-deoxy-2'-fluorocytidine
  modified_base (8)..(8): 2'-O-methyladenosine
  modified_base (9)..(9): 2'-deoxy-2'-fluorouridine
  modified_base (10)..(10): cm
  modified_base (11)..(11): gm
  modified_base (12)..(12): 2'-deoxy-2'-fluorocytidine
  modified_base (13)..(13): 2'-O-methyladenosine
  modified_base (14)..(14): 2'-deoxy-2'-fluorouridine
  modified_base (15)..(15): gm
  modified_base (16)..(16): 2'-deoxy-2'-fluorouridine
  modified_base (17)..(17): um
  modified_base (18)..(18): 2'-deoxy-2'-fluoroguanosine
  modified_base (19)..(19): um
  modified_base (20)..(20): 2'-deoxy-2'-fluoroguanosine
  modified_base (21)..(21): gm
  modified_base (22)..(22): 2'-deoxy-2'-fluorocytidine
  misc_feature (22)..(23): 5'-phosphonothioate
  modified_base (23)..(23): 2'-O-methyladenosine
uccaaacaucgcauguuguggca

SEQ ID NO: 6432 - RNA, 23 nt, Artificial Sequence
  siRNA antisense strand against b2GPI
  modified_base (1)..(1): 2'-deoxy-2'-fluorouridine
  modified_base (2)..(2): um
  misc_feature (2)..(3): 5'-phosphonothioate
  modified_base (3)..(3): 2'-deoxy-2'-fluorocytidine
  modified_base (4)..(4): cm
  modified_base (5)..(5): 2'-deoxy-2'-fluoroadenosine
  modified_base (6)..(6): 2'-O-methyladenosine
  modified_base (7)..(7): 2'-deoxy-2'-fluoroadenosine
  modified_base (8)..(8): cm
  modified_base (9)..(9): 2'-deoxy-2'-fluoroadenosine
  modified_base (10)..(10): um
  modified_base (11)..(11): cm
  modified_base (12)..(12): 2'-deoxy-2'-fluoroguanosine
  modified_base (13)..(13): cm
  modified_base (14)..(14): 2'-deoxy-2'-fluoroadenosine
  modified_base (15)..(15): um
  modified_base (16)..(16): 2'-deoxy-2'-fluoroguanosine
  modified_base (17)..(17): um
  modified_base (18)..(18): 2'-deoxy-2'-fluorouridine
  modified_base (19)..(19): gm
  modified_base (20)..(20): 2'-deoxy-2'-fluorouridine
  modified_base (21)..(21): gm
  modified_base (22)..(22): 2'-deoxy-2'-fluoroguanosine
  misc_feature (22)..(23): 5'-phosphonothioate
  modified_base (23)..(23): cm
uuccaaacaucgcauguuguggc

SEQ ID NO: 6433 - RNA, 23 nt, Artificial Sequence
  siRNA antisense strand against b2GPI
  modified_base (1)..(1): 2'-deoxy-2'-fluoroadenosine
  modified_base (2)..(2): um
  misc_feature (2)..(3): 5'-phosphonothioate
  modified_base (3)..(3): 2'-deoxy-2'-fluorouridine
  modified_base (4)..(4): um
  modified_base (5)..(5): 2'-deoxy-2'-fluorocytidine
  modified_base (6)..(6): cm
  modified_base (7)..(7): 2'-deoxy-2'-fluoroadenosine
  modified_base (8)..(8): 2'-O-methyladenosine
  modified_base (9)..(9): 2'-deoxy-2'-fluoroadenosine
  modified_base (10)..(10): cm
  modified_base (11)..(11): 2'-O-methyladenosine
  modified_base (12)..(12): 2'-deoxy-2'-fluorouridine
  modified_base (13)..(13): cm
  modified_base (14)..(14): 2'-deoxy-2'-fluoroguanosine
  modified_base (15)..(15): cm
  modified_base (16)..(16): 2'-deoxy-2'-fluoroadenosine
  modified_base (17)..(17): um
  modified_base (18)..(18): 2'-deoxy-2'-fluoroguanosine
  modified_base (19)..(19): um
  modified_base (20)..(20): 2'-deoxy-2'-fluorouridine
  modified_base (21)..(21): gm
  modified_base (22)..(22): 2'-deoxy-2'-fluorouridine
  misc_feature (22)..(23): 5'-phosphonothioate
  modified_base (23)..(23): gm
auuuccaaacaucgcauguugug

SEQ ID NO: 6434 - RNA, 23 nt, Artificial Sequence
  siRNA antisense strand against b2GPI
  modified_base (1)..(1): 2'-deoxy-2'-fluorouridine
  modified_base (2)..(2): cm
  misc_feature (2)..(3): 5'-phosphonothioate
  modified_base (3)..(3): 2'-deoxy-2'-fluoroadenosine
  modified_base (4)..(4): um
  modified_base (5)..(5): 2'-deoxy-2'-fluorouridine
  modified_base (6)..(6): um
  modified_base (7)..(7): 2'-deoxy-2'-fluorocytidine
  modified_base (8)..(8): cm
  modified_base (9)..(9): 2'-deoxy-2'-fluoroadenosine
  modified_base (10)..(10): 2'-O-methyladenosine
  modified_base (11)..(11): 2'-O-methyladenosine
  modified_base (12)..(12): 2'-deoxy-2'-fluorocytidine
  modified_base (13)..(13): 2'-O-methyladenosine
  modified_base (14)..(14): 2'-deoxy-2'-fluorouridine
  modified_base (15)..(15): cm
  modified_base (16)..(16): 2'-deoxy-2'-fluoroguanosine
  modified_base (17)..(17): cm
  modified_base (18)..(18): 2'-deoxy-2'-fluoroadenosine
  modified_base (19)..(19): um
  modified_base (20)..(20): 2'-deoxy-2'-fluoroguanosine
  modified_base (21)..(21): um
  modified_base (22)..(22): 2'-deoxy-2'-fluorouridine
  misc_feature (22)..(23): 5'-phosphonothioate
  modified_base (23)..(23): gm
ucauuuccaaacaucgcauguug

SEQ ID NO: 6435 - RNA, 23 nt, Artificial Sequence
  siRNA antisense strand against b2GPI
  modified_base (1)..(1): 2'-deoxy-2'-fluoroadenosine
  modified_base (2)..(2): um
  misc_feature (2)..(3): 5'-phosphonothioate
  modified_base (3)..(3): 2'-deoxy-2'-fluorocytidine
  modified_base (4)..(4): 2'-O-methyladenosine
  modified_base (5)..(5): 2'-deoxy-2'-fluorouridine
  modified_base (6)..(6): um
  modified_base (7)..(7): 2'-deoxy-2'-fluorouridine
  modified_base (8)..(8): cm
  modified_base (9)..(9): 2'-deoxy-2'-fluorocytidine
  modified_base (10)..(10): 2'-O-methyladenosine
  modified_base (11)..(11): 2'-O-methyladenosine
  modified_base (12)..(12): 2'-deoxy-2'-fluoroadenosine
  modified_base (13)..(13): cm
  modified_base (14)..(14): 2'-deoxy-2'-fluoroadenosine
  modified_base (15)..(15): um
  modified_base (16)..(16): 2'-deoxy-2'-fluorocytidine
  modified_base (17)..(17): gm
  modified_base (18)..(18): 2'-deoxy-2'-fluorocytidine
  modified_base (19)..(19): 2'-O-methyladenosine
  modified_base (20)..(20): 2'-deoxy-2'-fluorouridine
  modified_base (21)..(21): gm
  modified_base (22)..(22): 2'-deoxy-2'-fluorouridine
  misc_feature (22)..(23): 5'-phosphonothioate
  modified_base (23)..(23): um
aucauuuccaaacaucgcauguu

SEQ ID NO: 6436 - RNA, 23 nt, Artificial Sequence
  siRNA antisense strand against b2GPI
  modified_base (1)..(1): 2'-deoxy-2'-fluorouridine
  modified_base (2)..(2): 2'-O-methyladenosine
  misc_feature (2)..(3): 5'-phosphonothioate
  modified_base (3)..(3): 2'-deoxy-2'-fluorouridine
  modified_base (4)..(4): cm
  modified_base (5)..(5): 2'-deoxy-2'-fluoroadenosine
  modified_base (6)..(6): um
  modified_base (7)..(7): 2'-deoxy-2'-fluorouridine
  modified_base (8)..(8): um
  modified_base (9)..(9): 2'-deoxy-2'-fluorocytidine
  modified_base (10)..(10): cm
  modified_base (11)..(11): 2'-O-methyladenosine
  modified_base (12)..(12): 2'-deoxy-2'-fluoroadenosine
  modified_base (13)..(13): 2'-O-methyladenosine
  modified_base (14)..(14): 2'-deoxy-2'-fluorocytidine
  modified_base (15)..(15): 2'-O-methyladenosine
  modified_base (16)..(16): 2'-deoxy-2'-fluorouridine
  modified_base (17)..(17): cm
  modified_base (18)..(18): 2'-deoxy-2'-fluoroguanosine
  modified_base (19)..(19): cm
  modified_base (20)..(20): 2'-deoxy-2'-fluoroadenosine
  modified_base (21)..(21): um
  modified_base (22)..(22): 2'-deoxy-2'-fluoroguanosine
  misc_feature (22)..(23): 5'-phosphonothioate
  modified_base (23)..(23): um
uaucauuuccaaacaucgcaugu

SEQ ID NO: 6437 - RNA, 23 nt, Artificial Sequence
  siRNA antisense strand against b2GPI
  modified_base (1)..(1): 2'-deoxy-2'-fluoroguanosine
  modified_base (2)..(2): um
  misc_feature (2)..(3): 5'-phosphonothioate
  modified_base (3)..(3): 2'-deoxy-2'-fluoroadenosine
  modified_base (4)..(4): um
  modified_base (5)..(5): 2'-deoxy-2'-fluorocytidine
  modified_base (6)..(6): 2'-O-methyladenosine
  modified_base (7)..(7): 2'-deoxy-2'-fluorouridine
  modified_base (8)..(8): um
  modified_base (9)..(9): 2'-deoxy-2'-fluorouridine
  modified_base (10)..(10): cm
  modified_base (11)..(11): cm
  modified_base (12)..(12): 2'-deoxy-2'-fluoroadenosine
  modified_base (13)..(13): 2'-O-methyladenosine
  modified_base (14)..(14): 2'-deoxy-2'-fluoroadenosine
  modified_base (15)..(15): cm
  modified_base (16)..(16): 2'-deoxy-2'-fluoroadenosine
  modified_base (17)..(17): um
  modified_base (18)..(18): 2'-deoxy-2'-fluorocytidine
  modified_base (19)..(19): gm
  modified_base (20)..(20): 2'-deoxy-2'-fluorocytidine
  modified_base (21)..(21): 2'-O-methyladenosine
  modified_base (22)..(22): 2'-deoxy-2'-fluorouridine
  misc_feature (22)..(23): 5'-phosphonothioate
  modified_base (23)..(23): gm
guaucauuuccaaacaucgcaug

SEQ ID NO: 6438 - RNA, 23 nt, Artificial Sequence
  siRNA antisense strand against b2GPI
  modified_base (1)..(1): 2'-deoxy-2'-fluorouridine
  modified_base (2)..(2): gm
  misc_feature (2)..(3): 5'-phosphonothioate
  modified_base (3)..(3): 2'-deoxy-2'-fluorouridine
  modified_base (4)..(4): 2'-O-methyladenosine
  modified_base (5)..(5): 2'-deoxy-2'-fluorouridine
  modified_base (6)..(6): cm
  modified_base (7)..(7): 2'-deoxy-2'-fluoroadenosine
  modified_base (8)..(8): um
  modified_base (9)..(9): 2'-deoxy-2'-fluorouridine
  modified_base (10)..(10): um
  modified_base (11)..(11): cm
  modified_base (12)..(12): 2'-deoxy-2'-fluorocytidine
  modified_base (13)..(13): 2'-O-methyladenosine
  modified_base (14)..(14): 2'-deoxy-2'-fluoroadenosine
  modified_base (15)..(15): 2'-O-methyladenosine
  modified_base (16)..(16): 2'-deoxy-2'-fluorocytidine
  modified_base (17)..(17): 2'-O-methyladenosine
  modified_base (18)..(18): 2'-deoxy-2'-fluorouridine
  modified_base (19)..(19): cm
  modified_base (20)..(20): 2'-deoxy-2'-fluoroguanosine
  modified_base (21)..(21): cm
  modified_base (22)..(22): 2'-deoxy-2'-fluoroadenosine
  misc_feature (22)..(23): 5'-phosphonothioate
  modified_base (23)..(23): um
uguaucauuuccaaacaucgcau

SEQ ID NO: 6439 - RNA, 23 nt, Artificial Sequence
  siRNA antisense strand against b2GPI
  modified_base (1)..(1): 2'-deoxy-2'-fluorouridine
  modified_base (2)..(2): um
  misc_feature (2)..(3): 5'-phosphonothioate
  modified_base (3)..(3): 2'-deoxy-2'-fluoroguanosine
  modified_base (4)..(4): um
  modified_base (5)..(5): 2'-deoxy-2'-fluoroadenosine
  modified_base (6)..(6): um
  modified_base (7)..(7): 2'-deoxy-2'-fluorocytidine
  modified_base (8)..(8): 2'-O-methyladenosine
  modified_base (9)..(9): 2'-deoxy-2'-fluorouridine
  modified_base (10)..(10): um
  modified_base (11)..(11): um
  modified_base (12)..(12): 2'-deoxy-2'-fluorocytidine
  modified_base (13)..(13): cm
  modified_base (14)..(14): 2'-deoxy-2'-fluoroadenosine
  modified_base (15)..(15): 2'-O-methyladenosine
  modified_base (16)..(16): 2'-deoxy-2'-fluoroadenosine
  modified_base (17)..(17): cm
  modified_base (18)..(18): 2'-deoxy-2'-fluoroadenosine
  modified_base (19)..(19): um
  modified_base (20)..(20): 2'-deoxy-2'-fluorocytidine
  modified_base (21)..(21): gm
  modified_base (22)..(22): 2'-deoxy-2'-fluorocytidine
  misc_feature (22)..(23): 5'-phosphonothioate
  modified_base (23)..(23): 2'-O-methyladenosine
uuguaucauuuccaaacaucgca

SEQ ID NO: 6440 - RNA, 23 nt, Artificial Sequence
  siRNA antisense strand against b2GPI
  modified_base (1)..(1): 2'-deoxy-2'-fluoroadenosine
  modified_base (2)..(2): 2'-O-methyladenosine
  misc_feature (2)..(3): 5'-phosphonothioate
  modified_base (3)..(3): 2'-deoxy-2'-fluorouridine
  modified_base (4)..(4): um
  modified_base (5)..(5): 2'-deoxy-2'-fluoroguanosine
  modified_base (6)..(6): um
  modified_base (7)..(7): 2'-deoxy-2'-fluoroadenosine
  modified_base (8)..(8): um
  modified_base (9)..(9): 2'-deoxy-2'-fluorocytidine
  modified_base (10)..(10): 2'-O-methyladenosine
  modified_base (11)..(11): um
  modified_base (12)..(12): 2'-deoxy-2'-fluorouridine
  modified_base (13)..(13): um
  modified_base (14)..(14): 2'-deoxy-2'-fluorocytidine
  modified_base (15)..(15): cm
  modified_base (16)..(16): 2'-deoxy-2'-fluoroadenosine
  modified_base (17)..(17): 2'-O-methyladenosine
  modified_base (18)..(18): 2'-deoxy-2'-fluoroadenosine
  modified_base (19)..(19): cm
  modified_base (20)..(20): 2'-deoxy-2'-fluoroadenosine
  modified_base (21)..(21): um
  modified_base (22)..(22): 2'-deoxy-2'-fluorocytidine
  misc_feature (22)..(23): 5'-phosphonothioate
  modified_base (23)..(23): gm
aauuguaucauuuccaaacaucg

SEQ ID NO: 6441 - RNA, 23 nt, Artificial Sequence
  siRNA antisense strand against b2GPI
  modified_base (1)..(1): 2'-deoxy-2'-fluorouridine
  modified_base (2)..(2): 2'-O-methyladenosine
  misc_feature (2)..(3): 5'-phosphonothioate
  modified_base (3)..(3): 2'-deoxy-2'-fluoroadenosine
  modified_base (4)..(4): um
  modified_base (5)..(5): 2'-deoxy-2'-fluorouridine
  modified_base (6)..(6): gm
  modified_base (7)..(7): 2'-deoxy-2'-fluorouridine
  modified_base (8)..(8): 2'-O-methyladenosine
  modified_base (9)..(9): 2'-deoxy-2'-fluorouridine
  modified_base (10)..(10): cm
  modified_base (11)..(11): 2'-O-methyladenosine
  modified_base (12)..(12): 2'-deoxy-2'-fluorouridine
  modified_base (13)..(13): um
  modified_base (14)..(14): 2'-deoxy-2'-fluorouridine
  modified_base (15)..(15): cm
  modified_base (16)..(16): 2'-deoxy-2'-fluorocytidine
  modified_base (17)..(17): 2'-O-methyladenosine
  modified_base (18)..(18): 2'-deoxy-2'-fluoroadenosine
  modified_base (19)..(19): 2'-O-methyladenosine
  modified_base (20)..(20): 2'-deoxy-2'-fluorocytidine
  modified_base (21)..(21): 2'-O-methyladenosine
  modified_base (22)..(22): 2'-deoxy-2'-fluorouridine
  misc_feature (22)..(23): 5'-phosphonothioate
  modified_base (23)..(23): cm
uaauuguaucauuuccaaacauc

SEQ ID NO: 6442 - RNA, 23 nt, Artificial Sequence
  siRNA antisense strand against b2GPI
  modified_base (1)..(1): 2'-deoxy-2'-fluoroadenosine
  modified_base (2)..(2): gm
  misc_feature (2)..(3): 5'-phosphonothioate
  modified_base (3)..(3): 2'-deoxy-2'-fluoroguanosine
  modified_base (4)..(4): um
  modified_base (5)..(5): 2'-deoxy-2'-fluoroadenosine
  modified_base (6)..(6): 2'-O-methyladenosine
  modified_base (7)..(7): 2'-deoxy-2'-fluorouridine
  modified_base (8)..(8): um
  modified_base (9)..(9): 2'-deoxy-2'-fluoroguanosine
  modified_base (10)..(10): um
  modified_base (11)..(11): 2'-O-methyladenosine
  modified_base (12)..(12): 2'-deoxy-2'-fluorouridine
  modified_base (13)..(13): cm
  modified_base (14)..(14): 2'-deoxy-2'-fluoroadenosine
  modified_base (15)..(15): um
  modified_base (16)..(16): 2'-deoxy-2'-fluorouridine
  modified_base (17)..(17): um
  modified_base (18)..(18): 2'-deoxy-2'-fluorocytidine
  modified_base (19)..(19): cm
  modified_base (20)..(20): 2'-deoxy-2'-fluoroadenosine
  modified_base (21)..(21): 2'-O-methyladenosine
  modified_base (22)..(22): 2'-deoxy-2'-fluoroadenosine
  misc_feature (22)..(23): 5'-phosphonothioate
  modified_base (23)..(23): cm
agguaauuguaucauuuccaaac

SEQ ID NO: 6443 - RNA, 23 nt, Artificial Sequence
  siRNA antisense strand against b2GPI
  modified_base (1)..(1): 2'-deoxy-2'-fluorouridine
  modified_base (2)..(2): cm
  misc_feature (2)..(3): 5'-phosphonothioate
  modified_base (3)..(3): 2'-deoxy-2'-fluoroguanosine
  modified_base (4)..(4): um
  modified_base (5)..(5): 2'-deoxy-2'-fluoroguanosine
  modified_base (6)..(6): cm
  modified_base (7)..(7): 2'-deoxy-2'-fluoroadenosine
  modified_base (8)..(8): gm
  modified_base (9)..(9): 2'-deoxy-2'-fluoroguanosine
  modified_base (10)..(10): um
  modified_base (11)..(11): 2'-O-methyladenosine
  modified_base (12)..(12): 2'-deoxy-2'-fluoroadenosine
  modified_base (13)..(13): um
  modified_base (14)..(14): 2'-deoxy-2'-fluorouridine
  modified_base (15)..(15): gm
  modified_base (16)..(16): 2'-deoxy-2'-fluorouridine
  modified_base (17)..(17): 2'-O-methyladenosine
  modified_base (18)..(18): 2'-deoxy-2'-fluorouridine
  modified_base (19)..(19): cm
  modified_base (20)..(20): 2'-deoxy-2'-fluoroadenosine
  modified_base (21)..(21): um
  modified_base (22)..(22): 2'-deoxy-2'-fluorouridine
  misc_feature (22)..(23): 5'-phosphonothioate
  modified_base (23)..(23): um
ucgugcagguaauuguaucauuu

SEQ ID NO: 6444 - RNA, 23 nt, Artificial Sequence
  siRNA antisense strand against b2GPI
  modified_base (1)..(1): 2'-deoxy-2'-fluorouridine
  modified_base (2)..(2): gm
  misc_feature (2)..(3): 5'-phosphonothioate
  modified_base (3)..(3): 2'-deoxy-2'-fluorouridine
  modified_base (4)..(4): cm
  modified_base (5)..(5): 2'-deoxy-2'-fluoroguanosine
  modified_base (6)..(6): um
  modified_base (7)..(7): 2'-deoxy-2'-fluoroguanosine
  modified_base (8)..(8): cm
  modified_base (9)..(9): 2'-deoxy-2'-fluoroadenosine
  modified_base (10)..(10): gm
  modified_base (11)..(11): gm
  modified_base (12)..(12): 2'-deoxy-2'-fluorouridine
  modified_base (13)..(13): 2'-O-methyladenosine
  modified_base (14)..(14): 2'-deoxy-2'-fluoroadenosine
  modified_base (15)..(15): um
  modified_base (16)..(16): 2'-deoxy-2'-fluorouridine
  modified_base (17)..(17): gm
  modified_base (18)..(18): 2'-deoxy-2'-fluorouridine
  modified_base (19)..(19): 2'-O-methyladenosine
  modified_base (20)..(20): 2'-deoxy-2'-fluorouridine
  modified_base (21)..(21): cm
  modified_base (22)..(22): 2'-deoxy-2'-fluoroadenosine
  misc_feature (22)..(23): 5'-phosphonothioate
  modified_base (23)..(23): um
ugucgugcagguaauuguaucau

SEQ ID NO: 6445 - RNA, 23 nt, Artificial Sequence
  siRNA antisense strand against b2GPI
  modified_base (1)..(1): 2'-deoxy-2'-fluoroguanosine
  modified_base (2)..(2): um
  misc_feature (2)..(3): 5'-phosphonothioate
  modified_base (3)..(3): 2'-deoxy-2'-fluoroguanosine
  modified_base (4)..(4): um
  modified_base (5)..(5): 2'-deoxy-2'-fluorocytidine
  modified_base (6)..(6): gm
  modified_base (7)..(7): 2'-deoxy-2'-fluorouridine
  modified_base (8)..(8): gm
  modified_base (9)..(9): 2'-deoxy-2'-fluorocytidine
  modified_base (10)..(10): 2'-O-methyladenosine
  modified_base (11)..(11): gm
  modified_base (12)..(12): 2'-deoxy-2'-fluoroguanosine
  modified_base (13)..(13): um
  modified_base (14)..(14): 2'-deoxy-2'-fluoroadenosine
  modified_base (15)..(15): 2'-O-methyladenosine
  modified_base (16)..(16): 2'-deoxy-2'-fluorouridine
  modified_base (17)..(17): um
  modified_base (18)..(18): 2'-deoxy-2'-fluoroguanosine
  modified_base (19)..(19): um
  modified_base (20)..(20): 2'-deoxy-2'-fluoroadenosine
  modified_base (21)..(21): um
  modified_base (22)..(22): 2'-deoxy-2'-fluorocytidine
  misc_feature (22)..(23): 5'-phosphonothioate
  modified_base (23)..(23): 2'-O-methyladenosine
gugucgugcagguaauuguauca

SEQ ID NO: 6446 - RNA, 23 nt, Artificial Sequence
  siRNA antisense strand against b2GPI
  modified_base (1)..(1): 2'-deoxy-2'-fluorouridine
  modified_base (2)..(2): gm
  misc_feature (2)..(3): 5'-phosphonothioate
  modified_base (3)..(3): 2'-deoxy-2'-fluorouridine
  modified_base (4)..(4): gm
  modified_base (5)..(5): 2'-deoxy-2'-fluorouridine
  modified_base (6)..(6): cm
  modified_base (7)..(7): 2'-deoxy-2'-fluoroguanosine
  modified_base (8)..(8): um
  modified_base (9)..(9): 2'-deoxy-2'-fluoroguanosine
  modified_base (10)..(10): cm
  modified_base (11)..(11): 2'-O-methyladenosine
  modified_base (12)..(12): 2'-deoxy-2'-fluoroguanosine
  modified_base (13)..(13): gm
  modified_base (14)..(14): 2'-deoxy-2'-fluorouridine
  modified_base (15)..(15): 2'-O-methyladenosine
  modified_base (16)..(16): 2'-deoxy-2'-fluoroadenosine
  modified_base (17)..(17): um
  modified_base (18)..(18): 2'-deoxy-2'-fluorouridine
  modified_base (19)..(19): gm
  modified_base (20)..(20): 2'-deoxy-2'-fluorouridine
  modified_base (21)..(21): 2'-O-methyladenosine
  modified_base (22)..(22): 2'-deoxy-2'-fluorouridine
  misc_feature (22)..(23): 5'-phosphonothioate
  modified_base (23)..(23): cm
ugugucgugcagguaauuguauc

SEQ ID NO: 6447 - RNA, 23 nt, Artificial Sequence
  siRNA antisense strand against b2GPI
  modified_base (1)..(1): 2'-deoxy-2'-fluoroadenosine
  modified_base (2)..(2): um
  misc_feature (2)..(3): 5'-phosphonothioate
  modified_base (3)..(3): 2'-deoxy-2'-fluoroguanosine
  modified_base (4)..(4): um
  modified_base (5)..(5): 2'-deoxy-2'-fluoroguanosine
  modified_base (6)..(6): um
  modified_base (7)..(7): 2'-deoxy-2'-fluorocytidine
  modified_base (8)..(8): gm
  modified_base (9)..(9): 2'-deoxy-2'-fluorouridine
  modified_base (10)..(10): gm
  modified_base (11)..(11): cm
  modified_base (12)..(12): 2'-deoxy-2'-fluoroadenosine
  modified_base (13)..(13): gm
  modified_base (14)..(14): 2'-deoxy-2'-fluoroguanosine
  modified_base (15)..(15): um
  modified_base (16)..(16): 2'-deoxy-2'-fluoroadenosine
  modified_base (17)..(17): 2'-O-methyladenosine
  modified_base (18)..(18): 2'-deoxy-2'-fluorouridine
  modified_base (19)..(19): um
  modified_base (20)..(20): 2'-deoxy-2'-fluoroguanosine
  modified_base (21)..(21): um
  modified_base (22)..(22): 2'-deoxy-2'-fluoroadenosine
  misc_feature (22)..(23): 5'-phosphonothioate
  modified_base (23)..(23): um
augugucgugcagguaauuguau

SEQ ID NO: 6448 - RNA, 23 nt, Artificial Sequence
  siRNA antisense strand against b2GPI
  modified_base (1)..(1): 2'-deoxy-2'-fluorouridine
  modified_base (2)..(2): um
  misc_feature (2)..(3): 5'-phosphonothioate
  modified_base (3)..(3): 2'-deoxy-2'-fluorocytidine
  modified_base (4)..(4): cm
  modified_base (5)..(5): 2'-deoxy-2'-fluoroadenosine
  modified_base (6)..(6): um
  modified_base (7)..(7): 2'-deoxy-2'-fluoroguanosine
  modified_base (8)..(8): um
  modified_base (9)..(9): 2'-deoxy-2'-fluoroguanosine
  modified_base (10)..(10): um
  modified_base (11)..(11): cm
  modified_base (12)..(12): 2'-deoxy-2'-fluoroguanosine
  modified_base (13)..(13): um
  modified_base (14)..(14): 2'-deoxy-2'-fluoroguanosine
  modified_base (15)..(15): cm
  modified_base (16)..(16): 2'-deoxy-2'-fluoroadenosine
  modified_base (17)..(17): gm
  modified_base (18)..(18): 2'-deoxy-2'-fluoroguanosine
  modified_base (19)..(19): um
  modified_base (20)..(20): 2'-deoxy-2'-fluoroadenosine
  modified_base (21)..(21): 2'-O-methyladenosine
  modified_base (22)..(22): 2'-deoxy-2'-fluorouridine
  misc_feature (22)..(23): 5'-phosphonothioate
  modified_base (23)..(23): um
uuccaugugucgugcagguaauu

SEQ ID NO: 6449 - RNA, 23 nt, Artificial Sequence
  siRNA antisense strand against b2GPI
  modified_base (1)..(1): 2'-deoxy-2'-fluorouridine
  modified_base (2)..(2): um
  misc_feature (2)..(3): 5'-phosphonothioate
  modified_base (3)..(3): 2'-deoxy-2'-fluorouridine
  modified_base (4)..(4): cm
  modified_base (5)..(5): 2'-deoxy-2'-fluorocytidine
  modified_base (6)..(6): 2'-O-methyladenosine
  modified_base (7)..(7): 2'-deoxy-2'-fluorouridine
  modified_base (8)..(8): gm
  modified_base (9)..(9): 2'-deoxy-2'-fluorouridine
  modified_base (10)..(10): gm
  modified_base (11)..(11): um
  modified_base (12)..(12): 2'-deoxy-2'-fluorocytidine
  modified_base (13)..(13): gm
  modified_base (14)..(14): 2'-deoxy-2'-fluorouridine
  modified_base (15)..(15): gm
  modified_base (16)..(16): 2'-deoxy-2'-fluorocytidine
  modified_base (17)..(17): 2'-O-methyladenosine
  modified_base (18)..(18): 2'-deoxy-2'-fluoroguanosine
  modified_base (19)..(19): gm
  modified_base (20)..(20): 2'-deoxy-2'-fluorouridine
  modified_base (21)..(21): 2'-O-methyladenosine
  modified_base (22)..(22): 2'-deoxy-2'-fluoroadenosine
  misc_feature (22)..(23): 5'-phosphonothioate
  modified_base (23)..(23): um
uuuccaugugucgugcagguaau

SEQ ID NO: 6450 - RNA, 23 nt, Artificial Sequence
  siRNA antisense strand against b2GPI
  modified_base (1)..(1): 2'-deoxy-2'-fluoroadenosine
  modified_base (2)..(2): um
  misc_feature (2)..(3): 5'-phosphonothioate
  modified_base (3)..(3): 2'-deoxy-2'-fluorouridine
  modified_base (4)..(4): um
  modified_base (5)..(5): 2'-deoxy-2'-fluorocytidine
  modified_base (6)..(6): cm
  modified_base (7)..(7): 2'-deoxy-2'-fluoroadenosine
  modified_base (8)..(8): um
  modified_base (9)..(9): 2'-deoxy-2'-fluoroguanosine
  modified_base (10)..(10): um
  modified_base (11)..(11): gm
  modified_base (12)..(12): 2'-deoxy-2'-fluorouridine
  modified_base (13)..(13): cm
  modified_base (14)..(14): 2'-deoxy-2'-fluoroguanosine
  modified_base (15)..(15): um
  modified_base (16)..(16): 2'-deoxy-2'-fluoroguanosine
  modified_base (17)..(17): cm
  modified_base (18)..(18): 2'-deoxy-2'-fluoroadenosine
  modified_base (19)..(19): gm
  modified_base (20)..(20): 2'-deoxy-2'-fluoroguanosine
  modified_base (21)..(21): um
  modified_base (22)..(22): 2'-deoxy-2'-fluoroadenosine
  misc_feature (22)..(23): 5'-phosphonothioate
  modified_base (23)..(23): 2'-O-methyladenosine
auuuccaugugucgugcagguaa

SEQ ID NO: 6451 - RNA, 23 nt, Artificial Sequence
  siRNA antisense strand against b2GPI
  modified_base (1)..(1): 2'-deoxy-2'-fluorouridine
  modified_base (2)..(2): cm
  misc_feature (2)..(3): 5'-phosphonothioate
  modified_base (3)..(3): 2'-deoxy-2'-fluorocytidine
  modified_base (4)..(4): 2'-O-methyladenosine
  modified_base (5)..(5): 2'-deoxy-2'-fluoroadenosine
  modified_base (6)..(6): um
  modified_base (7)..(7): 2'-deoxy-2'-fluorouridine
  modified_base (8)..(8): um
  modified_base (9)..(9): 2'-deoxy-2'-fluorocytidine
  modified_base (10)..(10): cm
  modified_base (11)..(11): 2'-O-methyladenosine
  modified_base (12)..(12): 2'-deoxy-2'-fluorouridine
  modified_base (13)..(13): gm
  modified_base (14)..(14): 2'-deoxy-2'-fluorouridine
  modified_base (15)..(15): gm
  modified_base (16)..(16): 2'-deoxy-2'-fluorouridine
  modified_base (17)..(17): cm
  modified_base (18)..(18): 2'-deoxy-2'-fluoroguanosine
  modified_base (19)..(19): um
  modified_base (20)..(20): 2'-deoxy-2'-fluoroguanosine
  modified_base (21)..(21): cm
  modified_base (22)..(22): 2'-deoxy-2'-fluoroadenosine
  misc_feature (22)..(23): 5'-phosphonothioate
  modified_base (23)..(23): gm
uccaauuuccaugugucgugcag

SEQ ID NO: 6452 - RNA, 23 nt, Artificial Sequence
  siRNA antisense strand against b2GPI
  modified_base (1)..(1): 2'-deoxy-2'-fluoroadenosine
  modified_base (2)..(2): gm
  misc_feature (2)..(3): 5'-phosphonothioate
  modified_base (3)..(3): 2'-deoxy-2'-fluorouridine
  modified_base (4)..(4): cm
  modified_base (5)..(5): 2'-deoxy-2'-fluorocytidine
  modified_base (6)..(6): 2'-O-methyladenosine
  modified_base (7)..(7): 2'-deoxy-2'-fluoroadenosine
  modified_base (8)..(8): um
  modified_base (9)..(9): 2'-deoxy-2'-fluorouridine
  modified_base (10)..(10): um
  modified_base (11)..(11): cm
  modified_base (12)..(12): 2'-deoxy-2'-fluorocytidine
  modified_base (13)..(13): 2'-O-methyladenosine
  modified_base (14)..(14): 2'-deoxy-2'-fluorouridine
  modified_base (15)..(15): gm
  modified_base (16)..(16): 2'-deoxy-2'-fluorouridine
  modified_base (17)..(17): gm
  modified_base (18)..(18): 2'-deoxy-2'-fluorouridine
  modified_base (19)..(19): cm
  modified_base (20)..(20): 2'-deoxy-2'-fluoroguanosine
  modified_base (21)..(21): um
  modified_base (22)..(22): 2'-deoxy-2'-fluoroguanosine
  misc_feature (22)..(23): 5'-phosphonothioate
  modified_base (23)..(23): cm
aguccaauuuccaugugucgugc

SEQ ID NO: 6453 - RNA, 23 nt, Artificial Sequence
  siRNA antisense strand against b2GPI
  modified_base (1)..(1): 2'-deoxy-2'-fluorouridine
  modified_base (2)..(2): 2'-O-methyladenosine
  misc_feature (2)..(3): 5'-phosphonothioate
  modified_base (3)..(3): 2'-deoxy-2'-fluoroguanosine
  modified_base (4)..(4): um
  modified_base (5)..(5): 2'-deoxy-2'-fluorocytidine
  modified_base (6)..(6): cm
  modified_base (7)..(7): 2'-deoxy-2'-fluoroadenosine
  modified_base (8)..(8): 2'-O-methyladenosine
  modified_base (9)..(9): 2'-deoxy-2'-fluorouridine
  modified_base (10)..(10): um
  modified_base (11)..(11): um
  modified_base (12)..(12): 2'-deoxy-2'-fluorocytidine
  modified_base (13)..(13): cm
  modified_base (14)..(14): 2'-deoxy-2'-fluoroadenosine
  modified_base (15)..(15): um
  modified_base (16)..(16): 2'-deoxy-2'-fluoroguanosine
  modified_base (17)..(17): um
  modified_base (18)..(18): 2'-deoxy-2'-fluoroguanosine
  modified_base (19)..(19): um
  modified_base (20)..(20): 2'-deoxy-2'-fluorocytidine
  modified_base (21)..(21): gm
  modified_base (22)..(22): 2'-deoxy-2'-fluorouridine
  misc_feature (22)..(23): 5'-phosphonothioate
  modified_base (23)..(23): gm
uaguccaauuuccaugugucgug

SEQ ID NO: 6454 - RNA, 23 nt, Artificial Sequence
  siRNA antisense strand against b2GPI
  modified_base (1)..(1): 2'-deoxy-2'-fluorouridine
  modified_base (2)..(2): um
  misc_feature (2)..(3): 5'-phosphonothioate
  modified_base (3)..(3): 2'-deoxy-2'-fluorouridine
  modified_base (4)..(4): 2'-O-methyladenosine
  modified_base (5)..(5): 2'-deoxy-2'-fluoroguanosine
  modified_base (6)..(6): um
  modified_base (7)..(7): 2'-deoxy-2'-fluorocytidine
  modified_base (8)..(8): cm
  modified_base (9)..(9): 2'-deoxy-2'-fluoroadenosine
  modified_base (10)..(10): 2'-O-methyladenosine
  modified_base (11)..(11): um
  modified_base (12)..(12): 2'-deoxy-2'-fluorouridine
  modified_base (13)..(13): um
  modified_base (14)..(14): 2'-deoxy-2'-fluorocytidine
  modified_base (15)..(15): cm
  modified_base (16)..(16): 2'-deoxy-2'-fluoroadenosine
  modified_base (17)..(17): um
  modified_base (18)..(18): 2'-deoxy-2'-fluoroguanosine
  modified_base (19)..(19): um
  modified_base (20)..(20): 2'-deoxy-2'-fluoroguanosine
  modified_base (21)..(21): um
  modified_base (22)..(22): 2'-deoxy-2'-fluorocytidine
  misc_feature (22)..(23): 5'-phosphonothioate
  modified_base (23)..(23): gm
uuuaguccaauuuccaugugucg

SEQ ID NO: 6455 - RNA, 23 nt, Artificial Sequence
  siRNA antisense strand against b2GPI
  modified_base (1)..(1): 2'-deoxy-2'-fluoroadenosine
  modified_base (2)..(2): um
  misc_feature (2)..(3): 5'-phosphonothioate
  modified_base (3)..(3): 2'-deoxy-2'-fluorouridine
  modified_base (4)..(4): um
  modified_base (5)..(5): 2'-deoxy-2'-fluoroadenosine
  modified_base (6)..(6): gm
  modified_base (7)..(7): 2'-deoxy-2'-fluorouridine
  modified_base (8)..(8): cm
  modified_base (9)..(9): 2'-deoxy-2'-fluorocytidine
  modified_base (10)..(10): 2'-O-methyladenosine
  modified_base (11)..(11): 2'-O-methyladenosine
  modified_base (12)..(12): 2'-deoxy-2'-fluorouridine
  modified_base (13)..(13): um
  modified_base (14)..(14): 2'-deoxy-2'-fluorouridine
  modified_base (15)..(15): cm
  modified_base (16)..(16): 2'-deoxy-2'-fluorocytidine
  modified_base (17)..(17): 2'-O-methyladenosine
  modified_base (18)..(18): 2'-deoxy-2'-fluorouridine
  modified_base (19)..(19): gm
  modified_base (20)..(20): 2'-deoxy-2'-fluorouridine
  modified_base (21)..(21): gm
  modified_base (22)..(22): 2'-deoxy-2'-fluorouridine
  misc_feature (22)..(23): 5'-phosphonothioate
  modified_base (23)..(23): cm
auuuaguccaauuuccauguguc

SEQ ID NO: 6456 - RNA, 23 nt, Artificial Sequence
  siRNA antisense strand against b2GPI
  modified_base (1)..(1): 2'-deoxy-2'-fluoroadenosine
  modified_base (2)..(2): 2'-O-methyladenosine
  misc_feature (2)..(3): 5'-phosphonothioate
  modified_base (3)..(3): 2'-deoxy-2'-fluorouridine
  modified_base (4)..(4): um
  modified_base (5)..(5): 2'-deoxy-2'-fluorouridine
  modified_base (6)..(6): 2'-O-methyladenosine
  modified_base (7)..(7): 2'-deoxy-2'-fluoroguanosine
  modified_base (8)..(8): um
  modified_base (9)..(9): 2'-deoxy-2'-fluorocytidine
  modified_base (10)..(10): cm
  modified_base (11)..(11): 2'-O-methyladenosine
  modified_base (12)..(12): 2'-deoxy-2'-fluoroadenosine
  modified_base (13)..(13): um
  modified_base (14)..(14): 2'-deoxy-2'-fluorouridine
  modified_base (15)..(15): um
  modified_base (16)..(16): 2'-deoxy-2'-fluorocytidine
  modified_base (17)..(17): cm
  modified_base (18)..(18): 2'-deoxy-2'-fluoroadenosine
  modified_base (19)..(19): um
  modified_base (20)..(20): 2'-deoxy-2'-fluoroguanosine
  modified_base (21)..(21): um
  modified_base (22)..(22): 2'-deoxy-2'-fluoroguanosine
  misc_feature (22)..(23): 5'-phosphonothioate
  modified_base (23)..(23): um
aauuuaguccaauuuccaugugu

SEQ ID NO: 6457 - RNA, 23 nt, Artificial Sequence
  siRNA antisense strand against b2GPI
  modified_base (1)..(1): 2'-deoxy-2'-fluorouridine
  modified_base (2)..(2): 2'-O-methyladenosine
  misc_feature (2)..(3): 5'-phosphonothioate
  modified_base (3)..(3): 2'-deoxy-2'-fluoroadenosine
  modified_base (4)..(4): um
  modified_base (5)..(5): 2'-deoxy-2'-fluorouridine
  modified_base (6)..(6): um
  modified_base (7)..(7): 2'-deoxy-2'-fluoroadenosine
  modified_base (8)..(8): gm
  modified_base (9)..(9): 2'-deoxy-2'-fluorouridine
  modified_base (10)..(10): cm
  modified_base (11)..(11): cm
  modified_base (12)..(12): 2'-deoxy-2'-fluoroadenosine
  modified_base (13)..(13): 2'-O-methyladenosine
  modified_base (14)..(14): 2'-deoxy-2'-fluorouridine
  modified_base (15)..(15): um
  modified_base (16)..(16): 2'-deoxy-2'-fluorouridine
  modified_base (17)..(17): cm
  modified_base (18)..(18): 2'-deoxy-2'-fluorocytidine
  modified_base (19)..(19): 2'-O-methyladenosine
  modified_base (20)..(20): 2'-deoxy-2'-fluorouridine
  modified_base (21)..(21): gm
  modified_base (22)..(22): 2'-deoxy-2'-fluorouridine
  misc_feature (22)..(23): 5'-phosphonothioate
  modified_base (23)..(23): gm
uaauuuaguccaauuuccaugug

SEQ ID NO: 6458 - RNA, 23 nt, Artificial Sequence
  siRNA antisense strand against b2GPI
  modified_base (1)..(1): 2'-deoxy-2'-fluoroguanosine
  modified_base (2)..(2): um
  misc_feature (2)..(3): 5'-phosphonothioate
  modified_base (3)..(3): 2'-deoxy-2'-fluoroadenosine
  modified_base (4)..(4): 2'-O-methyladenosine
  modified_base (5)..(5): 2'-deoxy-2'-fluorouridine
  modified_base (6)..(6): um
  modified_base (7)..(7): 2'-deoxy-2'-fluorouridine
  modified_base (8)..(8): 2'-O-methyladenosine
  modified_base (9)..(9): 2'-deoxy-2'-fluoroguanosine
  modified_base (10)..(10): um
  modified_base (11)..(11): cm
  modified_base (12)..(12): 2'-deoxy-2'-fluorocytidine
  modified_base (13)..(13): 2'-O-methyladenosine
  modified_base (14)..(14): 2'-deoxy-2'-fluoroadenosine
  modified_base (15)..(15): um
  modified_base (16)..(16): 2'-deoxy-2'-fluorouridine
  modified_base (17)..(17): um
  modified_base (18)..(18): 2'-deoxy-2'-fluorocytidine
  modified_base (19)..(19): cm
  modified_base (20)..(20): 2'-deoxy-2'-fluoroadenosine
  modified_base (21)..(21): um
  modified_base (22)..(22): 2'-deoxy-2'-fluoroguanosine
  misc_feature (22)..(23): 5'-phosphonothioate
  modified_base (23)..(23): um
guaauuuaguccaauuuccaugu

SEQ ID NO: 6459 - RNA, 23 nt, Artificial Sequence
  siRNA antisense strand against b2GPI
  modified_base (1)..(1): 2'-deoxy-2'-fluorouridine
  modified_base (2)..(2): gm
  misc_feature (2)..(3): 5'-phosphonothioate
  modified_base (3)..(3): 2'-deoxy-2'-fluoroguanosine
  modified_base (4)..(4): um
  modified_base (5)..(5): 2'-deoxy-2'-fluoroadenosine
  modified_base (6)..(6): 2'-O-methyladenosine
  modified_base (7)..(7): 2'-deoxy-2'-fluorouridine
  modified_base (8)..(8): um
  modified_base (9)..(9): 2'-deoxy-2'-fluorouridine
  modified_base (10)..(10): 2'-O-methyladenosine
  modified_base (11)..(11): gm
  modified_base (12)..(12): 2'-deoxy-2'-fluorouridine
  modified_base (13)..(13): cm
  modified_base (14)..(14): 2'-deoxy-2'-fluorocytidine
  modified_base (15)..(15): 2'-O-methyladenosine
  modified_base (16)..(16): 2'-deoxy-2'-fluoroadenosine
  modified_base (17)..(17): um
  modified_base (18)..(18): 2'-deoxy-2'-fluorouridine
  modified_base (19)..(19): um
  modified_base (20)..(20): 2'-deoxy-2'-fluorocytidine
  modified_base (21)..(21): cm
  modified_base (22)..(22): 2'-deoxy-2'-fluoroadenosine
  misc_feature (22)..(23): 5'-phosphonothioate
  modified_base (23)..(23): um
ugguaauuuaguccaauuuccau

SEQ ID NO: 6460 - RNA, 23 nt, Artificial Sequence
  siRNA antisense strand against b2GPI
  modified_base (1)..(1): 2'-deoxy-2'-fluorocytidine
  modified_base (2)..(2): 2'-O-methyladenosine
  misc_feature (2)..(3): 5'-phosphonothioate
  modified_base (3)..(3): 2'-deoxy-2'-fluorouridine
  modified_base (4)..(4): um
  modified_base (5)..(5): 2'-deoxy-2'-fluorocytidine
  modified_base (6)..(6): um
  modified_base (7)..(7): 2'-deoxy-2'-fluoroguanosine
  modified_base (8)..(8): gm
  modified_base (9)..(9): 2'-deoxy-2'-fluorouridine
  modified_base (10)..(10): 2'-O-methyladenosine
  modified_base (11)..(11): 2'-O-methyladenosine
  modified_base (12)..(12): 2'-deoxy-2'-fluorouridine
  modified_base (13)..(13): um
  modified_base (14)..(14): 2'-deoxy-2'-fluorouridine
  modified_base (15)..(15): 2'-O-methyladenosine
  modified_base (16)..(16): 2'-deoxy-2'-fluoroguanosine
  modified_base (17)..(17): um
  modified_base (18)..(18): 2'-deoxy-2'-fluorocytidine
  modified_base (19)..(19): cm
  modified_base (20)..(20): 2'-deoxy-2'-fluoroadenosine
  modified_base (21)..(21): 2'-O-methyladenosine
  modified_base (22)..(22): 2'-deoxy-2'-fluorouridine
  misc_feature (22)..(23): 5'-phosphonothioate
  modified_base (23)..(23): um
cauucugguaauuuaguccaauu

SEQ ID NO: 6461 - RNA, 23 nt, Artificial Sequence
  siRNA antisense strand against b2GPI
  modified_base (1)..(1): 2'-deoxy-2'-fluorouridine
  modified_base (2)..(2): um
  misc_feature (2)..(3): 5'-phosphonothioate
  modified_base (3)..(3): 2'-deoxy-2'-fluoroadenosine
  modified_base (4)..(4): cm
  modified_base (5)..(5): 2'-deoxy-2'-fluorouridine
  modified_base (6)..(6): um
  modified_base (7)..(7): 2'-deoxy-2'-fluorocytidine
  modified_base (8)..(8): cm
  modified_base (9)..(9): 2'-deoxy-2'-fluorocytidine
  modified_base (10)..(10): um
  modified_base (11)..(11): gm
  modified_base (12)..(12): 2'-deoxy-2'-fluorocytidine
  modified_base (13)..(13): 2'-O-methyladenosine
  modified_base (14)..(14): 2'-deoxy-2'-fluorouridine
  modified_base (15)..(15): um
  modified_base (16)..(16): 2'-deoxy-2'-fluorocytidine
  modified_base (17)..(17): um
  modified_base (18)..(18): 2'-deoxy-2'-fluoroguanosine
  modified_base (19)..(19): gm
  modified_base (20)..(20): 2'-deoxy-2'-fluorouridine
  modified_base (21)..(21): 2'-O-methyladenosine
  modified_base (22)..(22): 2'-deoxy-2'-fluoroadenosine
  misc_feature (22)..(23): 5'-phosphonothioate
  modified_base (23)..(23): um
uuacuucccugcauucugguaau

SEQ ID NO: 6462 - RNA, 23 nt, Artificial Sequence
  siRNA antisense strand against b2GPI
  modified_base (1)..(1): 2'-deoxy-2'-fluorouridine
  modified_base (2)..(2): um
  misc_feature (2)..(3): 5'-phosphonothioate
  modified_base (3)..(3): 2'-deoxy-2'-fluorouridine
  modified_base (4)..(4): 2'-O-methyladenosine
  modified_base (5)..(5): 2'-deoxy-2'-fluorocytidine
  modified_base (6)..(6): um
  modified_base (7)..(7): 2'-deoxy-2'-fluorouridine
  modified_base (8)..(8): cm
  modified_base (9)..(9): 2'-deoxy-2'-fluorocytidine
  modified_base (10)..(10): cm
  modified_base (11)..(11): um
  modified_base (12)..(12): 2'-deoxy-2'-fluoroguanosine
  modified_base (13)..(13): cm
  modified_base (14)..(14): 2'-deoxy-2'-fluoroadenosine
  modified_base (15)..(15): um
  modified_base (16)..(16): 2'-deoxy-2'-fluorouridine
  modified_base (17)..(17): cm
  modified_base (18)..(18): 2'-deoxy-2'-fluorouridine
  modified_base (19)..(19): gm
  modified_base (20)..(20): 2'-deoxy-2'-fluoroguanosine
  modified_base (21)..(21): um
  modified_base (22)..(22): 2'-deoxy-2'-fluoroadenosine
  misc_feature (22)..(23): 5'-phosphonothioate
  modified_base (23)..(23): 2'-O-methyladenosine
uuuacuucccugcauucugguaa

SEQ ID NO: 6463 - RNA, 23 nt, Artificial Sequence
  siRNA antisense strand against b2GPI
  modified_base (1)..(1): 2'-deoxy-2'-fluorouridine
  modified_base (2)..(2): um
  misc_feature (2)..(3): 5'-phosphonothioate
  modified_base (3)..(3): 2'-deoxy-2'-fluorouridine
  modified_base (4)..(4): um
  modified_base (5)..(5): 2'-deoxy-2'-fluoroadenosine
  modified_base (6)..(6): cm
  modified_base (7)..(7): 2'-deoxy-2'-fluorouridine
  modified_base (8)..(8): um
  modified_base (9)..(9): 2'-deoxy-2'-fluorocytidine
  modified_base (10)..(10): cm
  modified_base (11)..(11): cm
  modified_base (12)..(12): 2'-deoxy-2'-fluorouridine
  modified_base (13)..(13): gm
  modified_base (14)..(14): 2'-deoxy-2'-fluorocytidine
  modified_base (15)..(15): 2'-O-methyladenosine
  modified_base (16)..(16): 2'-deoxy-2'-fluorouridine
  modified_base (17)..(17): um
  modified_base (18)..(18): 2'-deoxy-2'-fluorocytidine
  modified_base (19)..(19): um
  modified_base (20)..(20): 2'-deoxy-2'-fluoroguanosine
  modified_base (21)..(21): gm
  modified_base (22)..(22): 2'-deoxy-2'-fluorouridine
  misc_feature (22)..(23): 5'-phosphonothioate
  modified_base (23)..(23): 2'-O-methyladenosine
uuuuacuucccugcauucuggua

SEQ ID NO: 6464 - RNA, 23 nt, Artificial Sequence
  siRNA antisense strand against b2GPI
  modified_base (1)..(1): 2'-deoxy-2'-fluoroadenosine
  modified_base (2)..(2): um
  misc_feature (2)..(3): 5'-phosphonothioate
  modified_base (3)..(3): 2'-deoxy-2'-fluorouridine
  modified_base (4)..(4): um
  modified_base (5)..(5): 2'-deoxy-2'-fluorouridine
  modified_base (6)..(6): 2'-O-methyladenosine
  modified_base (7)..(7): 2'-deoxy-2'-fluorocytidine
  modified_base (8)..(8): um
  modified_base (9)..(9): 2'-deoxy-2'-fluorouridine
  modified_base (10)..(10): cm
  modified_base (11)..(11): cm
  modified_base (12)..(12): 2'-deoxy-2'-fluorocytidine
  modified_base (13)..(13): um
  modified_base (14)..(14): 2'-deoxy-2'-fluoroguanosine
  modified_base (15)..(15): cm
  modified_base (16)..(16): 2'-deoxy-2'-fluoroadenosine
  modified_base (17)..(17): um
  modified_base (18)..(18): 2'-deoxy-2'-fluorouridine
  modified_base (19)..(19): cm
  modified_base (20)..(20): 2'-deoxy-2'-fluorouridine
  modified_base (21)..(21): gm
  modified_base (22)..(22): 2'-deoxy-2'-fluoroguanosine
  misc_feature (22)..(23): 5'-phosphonothioate
  modified_base (23)..(23): um
auuuuacuucccugcauucuggu

SEQ ID NO: 6465 - RNA, 23 nt, Artificial Sequence
  siRNA antisense strand against b2GPI
  modified_base (1)..(1): 2'-deoxy-2'-fluorocytidine
  modified_base (2)..(2): 2'-O-methyladenosine
  misc_feature (2)..(3): 5'-phosphonothioate
  modified_base (3)..(3): 2'-deoxy-2'-fluorouridine
  modified_base (4)..(4): um
  modified_base (5)..(5): 2'-deoxy-2'-fluorouridine
  modified_base (6)..(6): um
  modified_base (7)..(7): 2'-deoxy-2'-fluoroadenosine
  modified_base (8)..(8): cm
  modified_base (9)..(9): 2'-deoxy-2'-fluorouridine
  modified_base (10)..(10): um
  modified_base (11)..(11): cm
  modified_base (12)..(12): 2'-deoxy-2'-fluorocytidine
  modified_base (13)..(13): cm
  modified_base (14)..(14): 2'-deoxy-2'-fluorouridine
  modified_base (15)..(15): gm
  modified_base (16)..(16): 2'-deoxy-2'-fluorocytidine
  modified_base (17)..(17): 2'-O-methyladenosine
  modified_base (18)..(18): 2'-deoxy-2'-fluorouridine
  modified_base (19)..(19): um
  modified_base (20)..(20): 2'-deoxy-2'-fluorocytidine
  modified_base (21)..(21): um
  modified_base (22)..(22): 2'-deoxy-2'-fluoroguanosine
  misc_feature (22)..(23): 5'-phosphonothioate
  modified_base (23)..(23): gm
cauuuuacuucccugcauucugg

SEQ ID NO: 6466 - RNA, 23 nt, Artificial Sequence
  siRNA antisense strand against b2GPI
  modified_base (1)..(1): 2'-deoxy-2'-fluorouridine
  modified_base (2)..(2): gm
  misc_feature (2)..(3): 5'-phosphonothioate
  modified_base (3)..(3): 2'-deoxy-2'-fluoroguanosine
  modified_base (4)..(4): gm
  modified_base (5)..(5): 2'-deoxy-2'-fluorocytidine
  modified_base (6)..(6): 2'-O-methyladenosine
  modified_base (7)..(7): 2'-deoxy-2'-fluorouridine
  modified_base (8)..(8): um
  modified_base (9)..(9): 2'-deoxy-2'-fluorouridine
  modified_base (10)..(10): um
  modified_base (11)..(11): 2'-O-methyladenosine
  modified_base (12)..(12): 2'-deoxy-2'-fluorocytidine
  modified_base (13)..(13): um
  modified_base (14)..(14): 2'-deoxy-2'-fluorouridine
  modified_base (15)..(15): cm
  modified_base (16)..(16): 2'-deoxy-2'-fluorocytidine
  modified_base (17)..(17): cm
  modified_base (18)..(18): 2'-deoxy-2'-fluorouridine
  modified_base (19)..(19): gm
  modified_base (20)..(20): 2'-deoxy-2'-fluorocytidine
  modified_base (21)..(21): 2'-O-methyladenosine
  modified_base (22)..(22): 2'-deoxy-2'-fluorouridine
  misc_feature (22)..(23): 5'-phosphonothioate
  modified_base (23)..(23): um
ugggcauuuuacuucccugcauu

SEQ ID NO: 6467 - RNA, 23 nt, Artificial Sequence
  siRNA antisense strand against b2GPI
  modified_base (1)..(1): 2'-deoxy-2'-fluoroguanosine
  modified_base (2)..(2): gm
  misc_feature (2)..(3): 5'-phosphonothioate
  modified_base (3)..(3): 2'-deoxy-2'-fluoroadenosine
  modified_base (4)..(4): 2'-O-methyladenosine
  modified_base (5)..(5): 2'-deoxy-2'-fluorouridine
  modified_base (6)..(6): gm
  modified_base (7)..(7): 2'-deoxy-2'-fluoroguanosine
  modified_base (8)..(8): gm
  modified_base (9)..(9): 2'-deoxy-2'-fluorocytidine
  modified_base (10)..(10): 2'-O-methyladenosine
  modified_base (11)..(11): um
  modified_base (12)..(12): 2'-deoxy-2'-fluorouridine
  modified_base (13)..(13): um
  modified_base (14)..(14): 2'-deoxy-2'-fluorouridine
  modified_base (15)..(15): 2'-O-methyladenosine
  modified_base (16)..(16): 2'-deoxy-2'-fluorocytidine
  modified_base (17)..(17): um
  modified_base (18)..(18): 2'-deoxy-2'-fluorouridine
  modified_base (19)..(19): cm
  modified_base (20)..(20): 2'-deoxy-2'-fluorocytidine
  modified_base (21)..(21): cm
  modified_base (22)..(22): 2'-deoxy-2'-fluorouridine
  misc_feature (22)..(23): 5'-phosphonothioate
  modified_base (23)..(23): gm
ggaaugggcauuuuacuucccug

SEQ ID NO: 6468 - RNA, 23 nt, Artificial Sequence
  siRNA antisense strand against b2GPI
  modified_base (1)..(1): 2'-deoxy-2'-fluoroadenosine
  modified_base (2)..(2): um
  misc_feature (2)..(3): 5'-phosphonothioate
  modified_base (3)..(3): 2'-deoxy-2'-fluoroguanosine
  modified_base (4)..(4): gm
  modified_base (5)..(5): 2'-deoxy-2'-fluoroguanosine
  modified_base (6)..(6): 2'-O-methyladenosine
  modified_base (7)..(7): 2'-deoxy-2'-fluoroadenosine
  modified_base (8)..(8): um
  modified_base (9)..(9): 2'-deoxy-2'-fluoroguanosine
  modified_base (10)..(10): gm
  modified_base (11)..(11): gm
  modified_base (12)..(12): 2'-deoxy-2'-fluorocytidine
  modified_base (13)..(13): 2'-O-methyladenosine
  modified_base (14)..(14): 2'-deoxy-2'-fluorouridine
  modified_base (15)..(15): um
  modified_base (16)..(16): 2'-deoxy-2'-fluorouridine
  modified_base (17)..(17): um
  modified_base (18)..(18): 2'-deoxy-2'-fluoroadenosine
  modified_base (19)..(19): cm
  modified_base (20)..(20): 2'-deoxy-2'-fluorouridine
  modified_base (21)..(21): um
  modified_base (22)..(22): 2'-deoxy-2'-fluorocytidine
  misc_feature (22)..(23): 5'-phosphonothioate
  modified_base (23)..(23): cm
augggaaugggcauuuuacuucc

SEQ ID NO: 6469 - RNA, 23 nt, Artificial Sequence
  siRNA antisense strand against b2GPI
  modified_base (1)..(1): 2'-deoxy-2'-fluorouridine
  modified_base (2)..(2): cm
  misc_feature (2)..(3): 5'-phosphonothioate
  modified_base (3)..(3): 2'-deoxy-2'-fluorouridine
  modified_base (4)..(4): um
  modified_base (5)..(5): 2'-deoxy-2'-fluoroguanosine
  modified_base (6)..(6): 2'-O-methyladenosine
  modified_base (7)..(7): 2'-deoxy-2'-fluorouridine
  modified_base (8)..(8): gm
  modified_base (9)..(9): 2'-deoxy-2'-fluoroguanosine
  modified_base (10)..(10): gm
  modified_base (11)..(11): 2'-O-methyladenosine
  modified_base (12)..(12): 2'-deoxy-2'-fluoroadenosine
  modified_base (13)..(13): um
  modified_base (14)..(14): 2'-deoxy-2'-fluoroguanosine
  modified_base (15)..(15): gm
  modified_base (16)..(16): 2'-deoxy-2'-fluoroguanosine
  modified_base (17)..(17): cm
  modified_base (18)..(18): 2'-deoxy-2'-fluoroadenosine
  modified_base (19)..(19): um
  modified_base (20)..(20): 2'-deoxy-2'-fluorouridine
  modified_base (21)..(21): um
  modified_base (22)..(22): 2'-deoxy-2'-fluorouridine
  misc_feature (22)..(23): 5'-phosphonothioate
  modified_base (23)..(23): 2'-O-methyladenosine
ucuugaugggaaugggcauuuua

SEQ ID NO: 6470 - RNA, 23 nt, Artificial Sequence
  siRNA antisense strand against b2GPI
  modified_base (1)..(1): 2'-deoxy-2'-fluoroguanosine
  modified_base (2)..(2): um
  misc_feature (2)..(3): 5'-phosphonothioate
  modified_base (3)..(3): 2'-deoxy-2'-fluorocytidine
  modified_base (4)..(4): um
  modified_base (5)..(5): 2'-deoxy-2'-fluorouridine
  modified_base (6)..(6): gm
  modified_base (7)..(7): 2'-deoxy-2'-fluoroadenosine
  modified_base (8)..(8): um
  modified_base (9)..(9): 2'-deoxy-2'-fluoroguanosine
  modified_base (10)..(10): gm
  modified_base (11)..(11): gm
  modified_base (12)..(12): 2'-deoxy-2'-fluoroadenosine
  modified_base (13)..(13): 2'-O-methyladenosine
  modified_base (14)..(14): 2'-deoxy-2'-fluorouridine
  modified_base (15)..(15): gm
  modified_base (16)..(16): 2'-deoxy-2'-fluoroguanosine
  modified_base (17)..(17): gm
  modified_base (18)..(18): 2'-deoxy-2'-fluorocytidine
  modified_base (19)..(19): 2'-O-methyladenosine
  modified_base (20)..(20): 2'-deoxy-2'-fluorouridine
  modified_base (21)..(21): um
  modified_base (22)..(22): 2'-deoxy-2'-fluorouridine
  misc_feature (22)..(23): 5'-phosphonothioate
  modified_base (23)..(23): um
gucuugaugggaaugggcauuuu

SEQ ID NO: 6471 - RNA, 23 nt, Artificial Sequence
  siRNA antisense strand against b2GPI
  modified_base (1)..(1): 2'-deoxy-2'-fluorouridine
  modified_base (2)..(2): gm
  misc_feature (2)..(3): 5'-phosphonothioate
  modified_base (3)..(3): 2'-deoxy-2'-fluoroguanosine
  modified_base (4)..(4): um
  modified_base (5)..(5): 2'-deoxy-2'-fluorocytidine
  modified_base (6)..(6): um
  modified_base (7)..(7): 2'-deoxy-2'-fluorouridine
  modified_base (8)..(8): gm
  modified_base (9)..(9): 2'-deoxy-2'-fluoroadenosine
  modified_base (10)..(10): um
  modified_base (11)..(11): gm
  modified_base (12)..(12): 2'-deoxy-2'-fluoroguanosine
  modified_base (13)..(13): gm
  modified_base (14)..(14): 2'-deoxy-2'-fluoroadenosine
  modified_base (15)..(15): 2'-O-methyladenosine
  modified_base (16)..(16): 2'-deoxy-2'-fluorouridine
  modified_base (17)..(17): gm
  modified_base (18)..(18): 2'-deoxy-2'-fluoroguanosine
  modified_base (19)..(19): gm
  modified_base (20)..(20): 2'-deoxy-2'-fluorocytidine
  modified_base (21)..(21): 2'-O-methyladenosine
  modified_base (22)..(22): 2'-deoxy-2'-fluorouridine
  misc_feature (22)..(23): 5'-phosphonothioate
  modified_base (23)..(23): um
uggucuugaugggaaugggcauu

SEQ ID NO: 6472 - RNA, 23 nt, Artificial Sequence
  siRNA antisense strand against b2GPI
  modified_base (1)..(1): 2'-deoxy-2'-fluorocytidine
  modified_base (2)..(2): um
  misc_feature (2)..(3): 5'-phosphonothioate
  modified_base (3)..(3): 2'-deoxy-2'-fluoroguanosine
  modified_base (4)..(4): gm
  modified_base (5)..(5): 2'-deoxy-2'-fluorouridine
  modified_base (6)..(6): cm
  modified_base (7)..(7): 2'-deoxy-2'-fluorouridine
  modified_base (8)..(8): um
  modified_base (9)..(9): 2'-deoxy-2'-fluoroguanosine
  modified_base (10)..(10): 2'-O-methyladenosine
  modified_base (11)..(11): um
  modified_base (12)..(12): 2'-deoxy-2'-fluoroguanosine
  modified_base (13)..(13): gm
  modified_base (14)..(14): 2'-deoxy-2'-fluoroguanosine
  modified_base (15)..(15): 2'-O-methyladenosine
  modified_base (16)..(16): 2'-deoxy-2'-fluoroadenosine
  modified_base (17)..(17): um
  modified_base (18)..(18): 2'-deoxy-2'-fluoroguanosine
  modified_base (19)..(19): gm
  modified_base (20)..(20): 2'-deoxy-2'-fluoroguanosine
  modified_base (21)..(21): cm
  modified_base (22)..(22): 2'-deoxy-2'-fluoroadenosine
  misc_feature (22)..(23): 5'-phosphonothioate
  modified_base (23)..(23): um
cuggucuugaugggaaugggcau

SEQ ID NO: 6473 - RNA, 23 nt, Artificial Sequence
  siRNA antisense strand against b2GPI
  modified_base (1)..(1): 2'-deoxy-2'-fluorouridine
  modified_base (2)..(2): cm
  misc_feature (2)..(3): 5'-phosphonothioate
  modified_base (3)..(3): 2'-deoxy-2'-fluorouridine
  modified_base (4)..(4): gm
  modified_base (5)..(5): 2'-deoxy-2'-fluoroguanosine
  modified_base (6)..(6): um
  modified_base (7)..(7): 2'-deoxy-2'-fluorocytidine
  modified_base (8)..(8): um
  modified_base (9)..(9): 2'-deoxy-2'-fluorouridine
  modified_base (10)..(10): gm
  modified_base (11)..(11): 2'-O-methyladenosine
  modified_base (12)..(12): 2'-deoxy-2'-fluorouridine
  modified_base (13)..(13): gm
  modified_base (14)..(14): 2'-deoxy-2'-fluoroguanosine
  modified_base (15)..(15): gm
  modified_base (16)..(16): 2'-deoxy-2'-fluoroadenosine
  modified_base (17)..(17): 2'-O-methyladenosine
  modified_base (18)..(18): 2'-deoxy-2'-fluorouridine
  modified_base (19)..(19): gm
  modified_base (20)..(20): 2'-deoxy-2'-fluoroguanosine
  modified_base (21)..(21): gm
  modified_base (22)..(22): 2'-deoxy-2'-fluorocytidine
  misc_feature (22)..(23): 5'-phosphonothioate
  modified_base (23)..(23): 2'-O-methyladenosine
ucuggucuugaugggaaugggca

SEQ ID NO: 6474 - RNA, 23 nt, Artificial Sequence
  siRNA antisense strand against b2GPI
  modified_base (1)..(1): 2'-deoxy-2'-fluoroadenosine
  modified_base (2)..(2): um
  misc_feature (2)..(3): 5'-phosphonothioate
  modified_base (3)..(3): 2'-deoxy-2'-fluorouridine
  modified_base (4)..(4): gm
  modified_base (5)..(5): 2'-deoxy-2'-fluorouridine
  modified_base (6)..(6): cm
  modified_base (7)..(7): 2'-deoxy-2'-fluorouridine
  modified_base (8)..(8): gm
  modified_base (9)..(9): 2'-deoxy-2'-fluoroguanosine
  modified_base (10)..(10): um
  modified_base (11)..(11): cm
  modified_base (12)..(12): 2'-deoxy-2'-fluorouridine
  modified_base (13)..(13): um
  modified_base (14)..(14): 2'-deoxy-2'-fluoroguanosine
  modified_base (15)..(15): 2'-O-methyladenosine
  modified_base (16)..(16): 2'-deoxy-2'-fluorouridine
  modified_base (17)..(17): gm
  modified_base (18)..(18): 2'-deoxy-2'-fluoroguanosine
  modified_base (19)..(19): gm
  modified_base (20)..(20): 2'-deoxy-2'-fluoroadenosine
  modified_base (21)..(21): 2'-O-methyladenosine
  modified_base (22)..(22): 2'-deoxy-2'-fluorouridine
  misc_feature (22)..(23): 5'-phosphonothioate
  modified_base (23)..(23): gm
auugucuggucuugaugggaaug

SEQ ID NO: 6475 - RNA, 23 nt, Artificial Sequence
  siRNA antisense strand against b2GPI
  modified_base (1)..(1): 2'-deoxy-2'-fluorocytidine
  modified_base (2)..(2): 2'-O-methyladenosine
  misc_feature (2)..(3): 5'-phosphonothioate
  modified_base (3)..(3): 2'-deoxy-2'-fluorouridine
  modified_base (4)..(4): um
  modified_base (5)..(5): 2'-deoxy-2'-fluoroguanosine
  modified_base (6)..(6): um
  modified_base (7)..(7): 2'-deoxy-2'-fluorocytidine
  modified_base (8)..(8): um
  modified_base (9)..(9): 2'-deoxy-2'-fluoroguanosine
  modified_base (10)..(10): gm
  modified_base (11)..(11): um
  modified_base (12)..(12): 2'-deoxy-2'-fluorocytidine
  modified_base (13)..(13): um
  modified_base (14)..(14): 2'-deoxy-2'-fluorouridine
  modified_base (15)..(15): gm
  modified_base (16)..(16): 2'-deoxy-2'-fluoroadenosine
  modified_base (17)..(17): um
  modified_base (18)..(18): 2'-deoxy-2'-fluoroguanosine
  modified_base (19)..(19): gm
  modified_base (20)..(20): 2'-deoxy-2'-fluoroguanosine
  modified_base (21)..(21): 2'-O-methyladenosine
  modified_base (22)..(22): 2'-deoxy-2'-fluoroadenosine
  misc_feature (22)..(23): 5'-phosphonothioate
  modified_base (23)..(23): um
cauugucuggucuugaugggaau

SEQ ID NO: 6476 - RNA, 23 nt, Artificial Sequence
  siRNA antisense strand against b2GPI
  modified_base (1)..(1): 2'-deoxy-2'-fluorocytidine
  modified_base (2)..(2): cm
  misc_feature (2)..(3): 5'-phosphonothioate
  modified_base (3)..(3): 2'-deoxy-2'-fluoroadenosine
  modified_base (4)..(4): um
  modified_base (5)..(5): 2'-deoxy-2'-fluorouridine
  modified_base (6)..(6): gm
  modified_base (7)..(7): 2'-deoxy-2'-fluorouridine
  modified_base (8)..(8): cm
  modified_base (9)..(9): 2'-deoxy-2'-fluorouridine
  modified_base (10)..(10): gm
  modified_base (11)..(11): gm
  modified_base (12)..(12): 2'-deoxy-2'-fluorouridine
  modified_base (13)..(13): cm
  modified_base (14)..(14): 2'-deoxy-2'-fluorouridine
  modified_base (15)..(15): um
  modified_base (16)..(16): 2'-deoxy-2'-fluoroguanosine
  modified_base (17)..(17): 2'-O-methyladenosine
  modified_base (18)..(18): 2'-deoxy-2'-fluorouridine
  modified_base (19)..(19): gm
  modified_base (20)..(20): 2'-deoxy-2'-fluoroguanosine
  modified_base (21)..(21): gm
  modified_base (22)..(22): 2'-deoxy-2'-fluoroadenosine
  misc_feature (22)..(23): 5'-phosphonothioate
  modified_base (23)..(23): 2'-O-methyladenosine
ccauugucuggucuugaugggaa

SEQ ID NO: 6477 - RNA, 23 nt, Artificial Sequence
  siRNA antisense strand against b2GPI
  modified_base (1)..(1): 2'-deoxy-2'-fluorouridine
  modified_base (2)..(2): cm
  misc_feature (2)..(3): 5'-phosphonothioate
  modified_base (3)..(3): 2'-deoxy-2'-fluorocytidine
  modified_base (4)..(4): 2'-O-methyladenosine
  modified_base (5)..(5): 2'-deoxy-2'-fluorouridine
  modified_base (6)..(6): um
  modified_base (7)..(7): 2'-deoxy-2'-fluoroguanosine
  modified_base (8)..(8): um
  modified_base (9)..(9): 2'-deoxy-2'-fluorocytidine
  modified_base (10)..(10): um
  modified_base (11)..(11): gm
  modified_base (12)..(12): 2'-deoxy-2'-fluoroguanosine
  modified_base (13)..(13): um
  modified_base (14)..(14): 2'-deoxy-2'-fluorocytidine
  modified_base (15)..(15): um
  modified_base (16)..(16): 2'-deoxy-2'-fluorouridine
  modified_base (17)..(17): gm
  modified_base (18)..(18): 2'-deoxy-2'-fluoroadenosine
  modified_base (19)..(19): um
  modified_base (20)..(20): 2'-deoxy-2'-fluoroguanosine
  modified_base (21)..(21): gm
  modified_base (22)..(22): 2'-deoxy-2'-fluoroguanosine
  misc_feature (22)..(23): 5'-phosphonothioate
  modified_base (23)..(23): 2'-O-methyladenosine
uccauugucuggucuugauggga

SEQ ID NO: 6478 - RNA, 23 nt, Artificial Sequence
  siRNA antisense strand against b2GPI
  modified_base (1)..(1): 2'-deoxy-2'-fluoroadenosine
  modified_base (2)..(2): um
  misc_feature (2)..(3): 5'-phosphonothioate
  modified_base (3)..(3): 2'-deoxy-2'-fluorocytidine
  modified_base (4)..(4): cm
  modified_base (5)..(5): 2'-deoxy-2'-fluoroadenosine
  modified_base (6)..(6): um
  modified_base (7)..(7): 2'-deoxy-2'-fluorouridine
  modified_base (8)..(8): gm
  modified_base (9)..(9): 2'-deoxy-2'-fluorouridine
  modified_base (10)..(10): cm
  modified_base (11)..(11): um
  modified_base (12)..(12): 2'-deoxy-2'-fluoroguanosine
  modified_base (13)..(13): gm
  modified_base (14)..(14): 2'-deoxy-2'-fluorouridine
  modified_base (15)..(15): cm
  modified_base (16)..(16): 2'-deoxy-2'-fluorouridine
  modified_base (17)..(17): um
  modified_base (18)..(18): 2'-deoxy-2'-fluoroguanosine
  modified_base (19)..(19): 2'-O-methyladenosine
  modified_base (20)..(20): 2'-deoxy-2'-fluorouridine
  modified_base (21)..(21): gm
  modified_base (22)..(22): 2'-deoxy-2'-fluoroguanosine
  misc_feature (22)..(23): 5'-phosphonothioate
  modified_base (23)..(23): gm
auccauugucuggucuugauggg

SEQ ID NO: 6479 - RNA, 23 nt, Artificial Sequence
  siRNA antisense strand against b2GPI
  modified_base (1)..(1): 2'-deoxy-2'-fluoroadenosine
  modified_base (2)..(2): 2'-O-methyladenosine
  misc_feature (2)..(3): 5'-phosphonothioate
  modified_base (3)..(3): 2'-deoxy-2'-fluorouridine
  modified_base (4)..(4): cm
  modified_base (5)..(5): 2'-deoxy-2'-fluorocytidine
  modified_base (6)..(6): 2'-O-methyladenosine
  modified_base (7)..(7): 2'-deoxy-2'-fluorouridine
  modified_base (8)..(8): um
  modified_base (9)..(9): 2'-deoxy-2'-fluoroguanosine
  modified_base (10)..(10): um
  modified_base (11)..(11): cm
  modified_base (12)..(12): 2'-deoxy-2'-fluorouridine
  modified_base (13)..(13): gm
  modified_base (14)..(14): 2'-deoxy-2'-fluoroguanosine
  modified_base (15)..(15): um
  modified_base (16)..(16): 2'-deoxy-2'-fluorocytidine
  modified_base (17)..(17): um
  modified_base (18)..(18): 2'-deoxy-2'-fluorouridine
  modified_base (19)..(19): gm
  modified_base (20)..(20): 2'-deoxy-2'-fluoroadenosine
  modified_base (21)..(21): um
  modified_base (22)..(22): 2'-deoxy-2'-fluoroguanosine
  misc_feature (22)..(23): 5'-phosphonothioate
  modified_base (23)..(23): gm
aauccauugucuggucuugaugg

SEQ ID NO: 6480 - RNA, 23 nt, Artificial Sequence
  siRNA antisense strand against b2GPI
  modified_base (1)..(1): 2'-deoxy-2'-fluoroadenosine
  modified_base (2)..(2): 2'-O-methyladenosine
  misc_feature (2)..(3): 5'-phosphonothioate
  modified_base (3)..(3): 2'-deoxy-2'-fluoroadenosine
  modified_base (4)..(4): um
  modified_base (5)..(5): 2'-deoxy-2'-fluorocytidine
  modified_base (6)..(6): cm
  modified_base (7)..(7): 2'-deoxy-2'-fluoroadenosine
  modified_base (8)..(8): um
  modified_base (9)..(9): 2'-deoxy-2'-fluorouridine
  modified_base (10)..(10): gm
  modified_base (11)..(11): um
  modified_base (12)..(12): 2'-deoxy-2'-fluorocytidine
  modified_base (13)..(13): um
  modified_base (14)..(14): 2'-deoxy-2'-fluoroguanosine
  modified_base (15)..(15): gm
  modified_base (16)..(16): 2'-deoxy-2'-fluorouridine
  modified_base (17)..(17): cm
  modified_base (18)..(18): 2'-deoxy-2'-fluorouridine
  modified_base (19)..(19): um
  modified_base (20)..(20): 2'-deoxy-2'-fluoroguanosine
  modified_base (21)..(21): 2'-O-methyladenosine
  modified_base (22)..(22): 2'-deoxy-2'-fluorouridine
  misc_feature (22)..(23): 5'-phosphonothioate
  modified_base (23)..(23): gm
aaauccauugucuggucuugaug

SEQ ID NO: 6481 - RNA, 23 nt, Artificial Sequence
  siRNA antisense strand against b2GPI
  modified_base (1)..(1): 2'-deoxy-2'-fluorocytidine
  modified_base (2)..(2): 2'-O-methyladenosine
  misc_feature (2)..(3): 5'-phosphonothioate
  modified_base (3)..(3): 2'-deoxy-2'-fluoroadenosine
  modified_base (4)..(4): 2'-O-methyladenosine
  modified_base (5)..(5): 2'-deoxy-2'-fluorouridine
  modified_base (6)..(6): cm
  modified_base (7)..(7): 2'-deoxy-2'-fluorocytidine
  modified_base (8)..(8): 2'-O-methyladenosine
  modified_base (9)..(9): 2'-deoxy-2'-fluorouridine
  modified_base (10)..(10): um
  modified_base (11)..(11): gm
  modified_base (12)..(12): 2'-deoxy-2'-fluorouridine
  modified_base (13)..(13): cm
  modified_base (14)..(14): 2'-deoxy-2'-fluorouridine
  modified_base (15)..(15): gm
  modified_base (16)..(16): 2'-deoxy-2'-fluoroguanosine
  modified_base (17)..(17): um
  modified_base (18)..(18): 2'-deoxy-2'-fluorocytidine
  modified_base (19)..(19): um
  modified_base (20)..(20): 2'-deoxy-2'-fluorouridine
  modified_base (21)..(21): gm
  modified_base (22)..(22): 2'-deoxy-2'-fluoroadenosine
  misc_feature (22)..(23): 5'-phosphonothioate
  modified_base (23)..(23): um
caaauccauugucuggucuugau

SEQ ID NO: 6482 - RNA, 23 nt, Artificial Sequence
  siRNA antisense strand against b2GPI
  modified_base (1)..(1): 2'-deoxy-2'-fluorocytidine
  modified_base (2)..(2): 2'-O-methyladenosine
  misc_feature (2)..(3): 5'-phosphonothioate
  modified_base (3)..(3): 2'-deoxy-2'-fluorocytidine
  modified_base (4)..(4): 2'-O-methyladenosine
  modified_base (5)..(5): 2'-deoxy-2'-fluoroadenosine
  modified_base (6)..(6): 2'-O-methyladenosine
  modified_base (7)..(7): 2'-deoxy-2'-fluorouridine
  modified_base (8)..(8): cm
  modified_base (9)..(9): 2'-deoxy-2'-fluorocytidine
  modified_base (10)..(10): 2'-O-methyladenosine
  modified_base (11)..(11): um
  modified_base (12)..(12): 2'-deoxy-2'-fluorouridine
  modified_base (13)..(13): gm
  modified_base (14)..(14): 2'-deoxy-2'-fluorouridine
  modified_base (15)..(15): cm
  modified_base (16)..(16): 2'-deoxy-2'-fluorouridine
  modified_base (17)..(17): gm
  modified_base (18)..(18): 2'-deoxy-2'-fluoroguanosine
  modified_base (19)..(19): um
  modified_base (20)..(20): 2'-deoxy-2'-fluorocytidine
  modified_base (21)..(21): um
  modified_base (22)..(22): 2'-deoxy-2'-fluorouridine
  misc_feature (22)..(23): 5'-phosphonothioate
  modified_base (23)..(23): gm
cacaaauccauugucuggucuug

SEQ ID NO: 6483 - RNA, 23 nt, Artificial Sequence
  siRNA antisense strand against b2GPI
  modified_base (1)..(1): 2'-deoxy-2'-fluorouridine
  modified_base (2)..(2): cm
  misc_feature (2)..(3): 5'-phosphonothioate
  modified_base (3)..(3): 2'-deoxy-2'-fluoroadenosine
  modified_base (4)..(4): cm
  modified_base (5)..(5): 2'-deoxy-2'-fluoroadenosine
  modified_base (6)..(6): 2'-O-methyladenosine
  modified_base (7)..(7): 2'-deoxy-2'-fluoroadenosine
  modified_base (8)..(8): um
  modified_base (9)..(9): 2'-deoxy-2'-fluorocytidine
  modified_base (10)..(10): cm
  modified_base (11)..(11): 2'-O-methyladenosine
  modified_base (12)..(12): 2'-deoxy-2'-fluorouridine
  modified_base (13)..(13): um
  modified_base (14)..(14): 2'-deoxy-2'-fluoroguanosine
  modified_base (15)..(15): um
  modified_base (16)..(16): 2'-deoxy-2'-fluorocytidine
  modified_base (17)..(17): um
  modified_base (18)..(18): 2'-deoxy-2'-fluoroguanosine
  modified_base (19)..(19): gm
  modified_base (20)..(20): 2'-deoxy-2'-fluorouridine
  modified_base (21)..(21): cm
  modified_base (22)..(22): 2'-deoxy-2'-fluorouridine
  misc_feature (22)..(23): 5'-phosphonothioate
  modified_base (23)..(23): um
ucacaaauccauugucuggucuu

SEQ ID NO: 6484 - RNA, 23 nt, Artificial Sequence
  siRNA antisense strand against b2GPI
  modified_base (1)..(1): 2'-deoxy-2'-fluorouridine
  modified_base (2)..(2): um
  misc_feature (2)..(3): 5'-phosphonothioate
  modified_base (3)..(3): 2'-deoxy-2'-fluorocytidine
  modified_base (4)..(4): 2'-O-methyladenosine
  modified_base (5)..(5): 2'-deoxy-2'-fluorocytidine
  modified_base (6)..(6): 2'-O-methyladenosine
  modified_base (7)..(7): 2'-deoxy-2'-fluoroadenosine
  modified_base (8)..(8): 2'-O-methyladenosine
  modified_base (9)..(9): 2'-deoxy-2'-fluorouridine
  modified_base (10)..(10): cm
  modified_base (11)..(11): cm
  modified_base (12)..(12): 2'-deoxy-2'-fluoroadenosine
  modified_base (13)..(13): um
  modified_base (14)..(14): 2'-deoxy-2'-fluorouridine
  modified_base (15)..(15): gm
  modified_base (16)..(16): 2'-deoxy-2'-fluorouridine
  modified_base (17)..(17): cm
  modified_base (18)..(18): 2'-deoxy-2'-fluorouridine
  modified_base (19)..(19): gm
  modified_base (20)..(20): 2'-deoxy-2'-fluoroguanosine
  modified_base (21)..(21): um
  modified_base (22)..(22): 2'-deoxy-2'-fluorocytidine
  misc_feature (22)..(23): 5'-phosphonothioate
  modified_base (23)..(23): um
uucacaaauccauugucuggucu

SEQ ID NO: 6485 - RNA, 23 nt, Artificial Sequence
  siRNA antisense strand against b2GPI
  modified_base (1)..(1): 2'-deoxy-2'-fluoroguanosine
  modified_base (2)..(2): um
  misc_feature (2)..(3): 5'-phosphonothioate
  modified_base (3)..(3): 2'-deoxy-2'-fluorouridine
  modified_base (4)..(4): cm
  modified_base (5)..(5): 2'-deoxy-2'-fluoroadenosine
  modified_base (6)..(6): cm
  modified_base (7)..(7): 2'-deoxy-2'-fluoroadenosine
  modified_base (8)..(8): 2'-O-methyladenosine
  modified_base (9)..(9): 2'-deoxy-2'-fluoroadenosine
  modified_base (10)..(10): um
  modified_base (11)..(11): cm
  modified_base (12)..(12): 2'-deoxy-2'-fluorocytidine
  modified_base (13)..(13): 2'-O-methyladenosine
  modified_base (14)..(14): 2'-deoxy-2'-fluorouridine
  modified_base (15)..(15): um
  modified_base (16)..(16): 2'-deoxy-2'-fluoroguanosine
  modified_base (17)..(17): um
  modified_base (18)..(18): 2'-deoxy-2'-fluorocytidine
  modified_base (19)..(19): um
  modified_base (20)..(20): 2'-deoxy-2'-fluoroguanosine
  modified_base (21)..(21): gm
  modified_base (22)..(22): 2'-deoxy-2'-fluorouridine
  misc_feature (22)..(23): 5'-phosphonothioate
  modified_base (23)..(23): cm
guucacaaauccauugucugguc

SEQ ID NO: 6486 - RNA, 23 nt, Artificial Sequence
  siRNA antisense strand against b2GPI
  modified_base (1)..(1): 2'-deoxy-2'-fluorouridine
  modified_base (2)..(2): 2'-O-methyladenosine
  misc_feature (2)..(3): 5'-phosphonothioate
  modified_base (3)..(3): 2'-deoxy-2'-fluoroguanosine
  modified_base (4)..(4): um
  modified_base (5)..(5): 2'-deoxy-2'-fluorouridine
  modified_base (6)..(6): cm
  modified_base (7)..(7): 2'-deoxy-2'-fluoroadenosine
  modified_base (8)..(8): cm
  modified_base (9)..(9): 2'-deoxy-2'-fluoroadenosine
  modified_base (10)..(10): 2'-O-methyladenosine
  modified_base (11)..(11): 2'-O-methyladenosine
  modified_base (12)..(12): 2'-deoxy-2'-fluorouridine
  modified_base (13)..(13): cm
  modified_base (14)..(14): 2'-deoxy-2'-fluorocytidine
  modified_base (15)..(15): 2'-O-methyladenosine
  modified_base (16)..(16): 2'-deoxy-2'-fluorouridine
  modified_base (17)..(17): um
  modified_base (18)..(18): 2'-deoxy-2'-fluoroguanosine
  modified_base (19)..(19): um
  modified_base (20)..(20): 2'-deoxy-2'-fluorocytidine
  modified_base (21)..(21): um
  modified_base (22)..(22): 2'-deoxy-2'-fluoroguanosine
  misc_feature (22)..(23): 5'-phosphonothioate
  modified_base (23)..(23): gm
uaguucacaaauccauugucugg

SEQ ID NO: 6487 - RNA, 23 nt, Artificial Sequence
  siRNA antisense strand against b2GPI
  modified_base (1)..(1): 2'-deoxy-2'-fluoroadenosine
  modified_base (2)..(2): um
  misc_feature (2)..(3): 5'-phosphonothioate
  modified_base (3)..(3): 2'-deoxy-2'-fluoroadenosine
  modified_base (4)..(4): gm
  modified_base (5)..(5): 2'-deoxy-2'-fluorouridine
  modified_base (6)..(6): um
  modified_base (7)..(7): 2'-deoxy-2'-fluorocytidine
  modified_base (8)..(8): 2'-O-methyladenosine
  modified_base (9)..(9): 2'-deoxy-2'-fluorocytidine
  modified_base (10)..(10): 2'-O-methyladenosine
  modified_base (11)..(11): 2'-O-methyladenosine
  modified_base (12)..(12): 2'-deoxy-2'-fluoroadenosine
  modified_base (13)..(13): um
  modified_base (14)..(14): 2'-deoxy-2'-fluorocytidine
  modified_base (15)..(15): cm
  modified_base (16)..(16): 2'-deoxy-2'-fluoroadenosine
  modified_base (17)..(17): um
  modified_base (18)..(18): 2'-deoxy-2'-fluorouridine
  modified_base (19)..(19): gm
  modified_base (20)..(20): 2'-deoxy-2'-fluorouridine
  modified_base (21)..(21): cm
  modified_base (22)..(22): 2'-deoxy-2'-fluorouridine
  misc_feature (22)..(23): 5'-phosphonothioate
  modified_base (23)..(23): gm
auaguucacaaauccauugucug

SEQ ID NO: 6488 - RNA, 23 nt, Artificial Sequence
  siRNA antisense strand against b2GPI
  modified_base (1)..(1): 2'-deoxy-2'-fluoroguanosine
  modified_base (2)..(2): 2'-O-methyladenosine
  misc_feature (2)..(3): 5'-phosphonothioate
  modified_base (3)..(3): 2'-deoxy-2'-fluorouridine
  modified_base (4)..(4): 2'-O-methyladenosine
  modified_base (5)..(5): 2'-deoxy-2'-fluoroguanosine
  modified_base (6)..(6): um
  modified_base (7)..(7): 2'-deoxy-2'-fluorouridine
  modified_base (8)..(8): cm
  modified_base (9)..(9): 2'-deoxy-2'-fluoroadenosine
  modified_base (10)..(10): cm
  modified_base (11)..(11): 2'-O-methyladenosine
  modified_base (12)..(12): 2'-deoxy-2'-fluoroadenosine
  modified_base (13)..(13): 2'-O-methyladenosine
  modified_base (14)..(14): 2'-deoxy-2'-fluorouridine
  modified_base (15)..(15): cm
  modified_base (16)..(16): 2'-deoxy-2'-fluorocytidine
  modified_base (17)..(17): 2'-O-methyladenosine
  modified_base (18)..(18): 2'-deoxy-2'-fluorouridine
  modified_base (19)..(19): um
  modified_base (20)..(20): 2'-deoxy-2'-fluoroguanosine
  modified_base (21)..(21): um
  modified_base (22)..(22): 2'-deoxy-2'-fluorocytidine
  misc_feature (22)..(23): 5'-phosphonothioate
  modified_base (23)..(23): um
gauaguucacaaauccauugucu

SEQ ID NO: 6489 - RNA, 23 nt, Artificial Sequence
  siRNA antisense strand against b2GPI
  modified_base (1)..(1): 2'-deoxy-2'-fluorocytidine
  modified_base (2)..(2): 2'-O-methyladenosine
  misc_feature (2)..(3): 5'-phosphonothioate
  modified_base (3)..(3): 2'-deoxy-2'-fluoroguanosine
  modified_base (4)..(4): gm
  modified_base (5)..(5): 2'-deoxy-2'-fluoroadenosine
  modified_base (6)..(6): um
  modified_base (7)..(7): 2'-deoxy-2'-fluoroadenosine
  modified_base (8)..(8): gm
  modified_base (9)..(9): 2'-deoxy-2'-fluorouridine
  modified_base (10)..(10): um
  modified_base (11)..(11): cm
  modified_base (12)..(12): 2'-deoxy-2'-fluoroadenosine
  modified_base (13)..(13): cm
  modified_base (14)..(14): 2'-deoxy-2'-fluoroadenosine
  modified_base (15)..(15): 2'-O-methyladenosine
  modified_base (16)..(16): 2'-deoxy-2'-fluoroadenosine
  modified_base (17)..(17): um
  modified_base (18)..(18): 2'-deoxy-2'-fluorocytidine
  modified_base (19)..(19): cm
  modified_base (20)..(20): 2'-deoxy-2'-fluoroadenosine
  modified_base (21)..(21): um
  modified_base (22)..(22): 2'-deoxy-2'-fluorouridine
  misc_feature (22)..(23): 5'-phosphonothioate
  modified_base (23)..(23): gm
caggauaguucacaaauccauug

SEQ ID NO: 6490 - RNA, 23 nt, Artificial Sequence
  siRNA antisense strand against b2GPI
  modified_base (1)..(1): 2'-deoxy-2'-fluorouridine
  modified_base (2)..(2): gm
  misc_feature (2)..(3): 5'-phosphonothioate
  modified_base (3)..(3): 2'-deoxy-2'-fluorocytidine
  modified_base (4)..(4): 2'-O-methyladenosine
  modified_base (5)..(5): 2'-deoxy-2'-fluoroguanosine
  modified_base (6)..(6): gm
  modified_base (7)..(7): 2'-deoxy-2'-fluoroadenosine
  modified_base (8)..(8): um
  modified_base (9)..(9): 2'-deoxy-2'-fluoroadenosine
  modified_base (10)..(10): gm
  modified_base (11)..(11): um
  modified_base (12)..(12): 2'-deoxy-2'-fluorouridine
  modified_base (13)..(13): cm
  modified_base (14)..(14): 2'-deoxy-2'-fluoroadenosine
  modified_base (15)..(15): cm
  modified_base (16)..(16): 2'-deoxy-2'-fluoroadenosine
  modified_base (17)..(17): 2'-O-methyladenosine
  modified_base (18)..(18): 2'-deoxy-2'-fluoroadenosine
  modified_base (19)..(19): um
  modified_base (20)..(20): 2'-deoxy-2'-fluorocytidine
  modified_base (21)..(21): cm
  modified_base (22)..(22): 2'-deoxy-2'-fluoroadenosine
  misc_feature (22)..(23): 5'-phosphonothioate
  modified_base (23)..(23): um
ugcaggauaguucacaaauccau

SEQ ID NO: 6491 - RNA, 23 nt, Artificial Sequence
  siRNA antisense strand against b2GPI
  modified_base (1)..(1): 2'-deoxy-2'-fluorouridine
  modified_base (2)..(2): um
  misc_feature (2)..(3): 5'-phosphonothioate
  modified_base (3)..(3): 2'-deoxy-2'-fluoroguanosine
  modified_base (4)..(4): cm
  modified_base (5)..(5): 2'-deoxy-2'-fluoroadenosine
  modified_base (6)..(6): gm
  modified_base (7)..(7): 2'-deoxy-2'-fluoroguanosine
  modified_base (8)..(8): 2'-O-methyladenosine
  modified_base (9)..(9): 2'-deoxy-2'-fluorouridine
  modified_base (10)..(10): 2'-O-methyladenosine
  modified_base (11)..(11): gm
  modified_base (12)..(12): 2'-deoxy-2'-fluorouridine
  modified_base (13)..(13): um
  modified_base (14)..(14): 2'-deoxy-2'-fluorocytidine
  modified_base (15)..(15): 2'-O-methyladenosine
  modified_base (16)..(16): 2'-deoxy-2'-fluorocytidine
  modified_base (17)..(17): 2'-O-methyladenosine
  modified_base (18)..(18): 2'-deoxy-2'-fluoroadenosine
  modified_base (19)..(19): 2'-O-methyladenosine
  modified_base (20)..(20): 2'-deoxy-2'-fluorouridine
  modified_base (21)..(21): cm
  modified_base (22)..(22): 2'-deoxy-2'-fluorocytidine
  misc_feature (22)..(23): 5'-phosphonothioate
  modified_base (23)..(23): 2'-O-methyladenosine
uugcaggauaguucacaaaucca

SEQ ID NO: 6492 - RNA, 23 nt, Artificial Sequence
  siRNA antisense strand against b2GPI
  modified_base (1)..(1): 2'-deoxy-2'-fluorouridine
  modified_base (2)..(2): um
  misc_feature (2)..(3): 5'-phosphonothioate
  modified_base (3)..(3): 2'-deoxy-2'-fluorouridine
  modified_base (4)..(4): gm
  modified_base (5)..(5): 2'-deoxy-2'-fluorocytidine
  modified_base (6)..(6): 2'-O-methyladenosine
  modified_base (7)..(7): 2'-deoxy-2'-fluoroguanosine
  modified_base (8)..(8): gm
  modified_base (9)..(9): 2'-deoxy-2'-fluoroadenosine
  modified_base (10)..(10): um
  modified_base (11)..(11): 2'-O-methyladenosine
  modified_base (12)..(12): 2'-deoxy-2'-fluoroguanosine
  modified_base (13)..(13): um
  modified_base (14)..(14): 2'-deoxy-2'-fluorouridine
  modified_base (15)..(15): cm
  modified_base (16)..(16): 2'-deoxy-2'-fluoroadenosine
  modified_base (17)..(17): cm
  modified_base (18)..(18): 2'-deoxy-2'-fluoroadenosine
  modified_base (19)..(19): 2'-O-methyladenosine
  modified_base (20)..(20): 2'-deoxy-2'-fluoroadenosine
  modified_base (21)..(21): um
  modified_base (22)..(22): 2'-deoxy-2'-fluorocytidine
  misc_feature (22)..(23): 5'-phosphonothioate
  modified_base (23)..(23): cm
uuugcaggauaguucacaaaucc

SEQ ID NO: 6493 - RNA, 23 nt, Artificial Sequence
  siRNA antisense strand against b2GPI
  modified_base (1)..(1): 2'-deoxy-2'-fluorouridine
  modified_base (2)..(2): um
  misc_feature (2)..(3): 5'-phosphonothioate
  modified_base (3)..(3): 2'-deoxy-2'-fluorouridine
  modified_base (4)..(4): um
  modified_base (5)..(5): 2'-deoxy-2'-fluoroguanosine
  modified_base (6)..(6): cm
  modified_base (7)..(7): 2'-deoxy-2'-fluoroadenosine
  modified_base (8)..(8): gm
  modified_base (9)..(9): 2'-deoxy-2'-fluoroguanosine
  modified_base (10)..(10): 2'-O-methyladenosine
  modified_base (11)..(11): um
  modified_base (12)..(12): 2'-deoxy-2'-fluoroadenosine
  modified_base (13)..(13): gm
  modified_base (14)..(14): 2'-deoxy-2'-fluorouridine
  modified_base (15)..(15): um
  modified_base (16)..(16): 2'-deoxy-2'-fluorocytidine
  modified_base (17)..(17): 2'-O-methyladenosine
  modified_base (18)..(18): 2'-deoxy-2'-fluorocytidine
  modified_base (19)..(19): 2'-O-methyladenosine
  modified_base (20)..(20): 2'-deoxy-2'-fluoroadenosine
  modified_base (21)..(21): 2'-O-methyladenosine
  modified_base (22)..(22): 2'-deoxy-2'-fluorouridine
  misc_feature (22)..(23): 5'-phosphonothioate
  modified_base (23)..(23): cm
uuuugcaggauaguucacaaauc

SEQ ID NO: 6494 - RNA, 23 nt, Artificial Sequence
  siRNA antisense strand against b2GPI
  modified_base (1)..(1): 2'-deoxy-2'-fluorouridine
  modified_base (2)..(2): gm
  misc_feature (2)..(3): 5'-phosphonothioate
  modified_base (3)..(3): 2'-deoxy-2'-fluoroguanosine
  modified_base (4)..(4): um
  modified_base (5)..(5): 2'-deoxy-2'-fluorouridine
  modified_base (6)..(6): um
  modified_base (7)..(7): 2'-deoxy-2'-fluorouridine
  modified_base (8)..(8): gm
  modified_base (9)..(9): 2'-deoxy-2'-fluorocytidine
  modified_base (10)..(10): 2'-O-methyladenosine
  modified_base (11)..(11): gm
  modified_base (12)..(12): 2'-deoxy-2'-fluoroguanosine
  modified_base (13)..(13): 2'-O-methyladenosine
  modified_base (14)..(14): 2'-deoxy-2'-fluorouridine
  modified_base (15)..(15): 2'-O-methyladenosine
  modified_base (16)..(16): 2'-deoxy-2'-fluoroguanosine
  modified_base (17)..(17): um
  modified_base (18)..(18): 2'-deoxy-2'-fluorouridine
  modified_base (19)..(19): cm
  modified_base (20)..(20): 2'-deoxy-2'-fluoroadenosine
  modified_base (21)..(21): cm
  modified_base (22)..(22): 2'-deoxy-2'-fluoroadenosine
  misc_feature (22)..(23): 5'-phosphonothioate
  modified_base (23)..(23): 2'-O-methyladenosine
ugguuuugcaggauaguucacaa

SEQ ID NO: 6495 - RNA, 23 nt, Artificial Sequence
  siRNA antisense strand against b2GPI
  modified_base (1)..(1): 2'-deoxy-2'-fluorouridine
  modified_base (2)..(2): um
  misc_feature (2)..(3): 5'-phosphonothioate
  modified_base (3)..(3): 2'-deoxy-2'-fluoroguanosine
  modified_base (4)..(4): gm
  modified_base (5)..(5): 2'-deoxy-2'-fluorouridine
  modified_base (6)..(6): um
  modified_base (7)..(7): 2'-deoxy-2'-fluorouridine
  modified_base (8)..(8): um
  modified_base (9)..(9): 2'-deoxy-2'-fluoroguanosine
  modified_base (10)..(10): cm
  modified_base (11)..(11): 2'-O-methyladenosine
  modified_base (12)..(12): 2'-deoxy-2'-fluoroguanosine
  modified_base (13)..(13): gm
  modified_base (14)..(14): 2'-deoxy-2'-fluoroadenosine
  modified_base (15)..(15): um
  modified_base (16)..(16): 2'-deoxy-2'-fluoroadenosine
  modified_base (17)..(17): gm
  modified_base (18)..(18): 2'-deoxy-2'-fluorouridine
  modified_base (19)..(19): um
  modified_base (20)..(20): 2'-deoxy-2'-fluorocytidine
  modified_base (21)..(21): 2'-O-methyladenosine
  modified_base (22)..(22): 2'-deoxy-2'-fluorocytidine
  misc_feature (22)..(23): 5'-phosphonothioate
  modified_base (23)..(23): 2'-O-methyladenosine
uugguuuugcaggauaguucaca

SEQ ID NO: 6496 - RNA, 23 nt, Artificial Sequence
  siRNA antisense strand against b2GPI
  modified_base (1)..(1): 2'-deoxy-2'-fluorouridine
  modified_base (2)..(2): gm
  misc_feature (2)..(3): 5'-phosphonothioate
  modified_base (3)..(3): 2'-deoxy-2'-fluorouridine
  modified_base (4)..(4): um
  modified_base (5)..(5): 2'-deoxy-2'-fluoroguanosine
  modified_base (6)..(6): gm
  modified_base (7)..(7): 2'-deoxy-2'-fluorouridine
  modified_base (8)..(8): um
  modified_base (9)..(9): 2'-deoxy-2'-fluorouridine
  modified_base (10)..(10): um
  modified_base (11)..(11): gm
  modified_base (12)..(12): 2'-deoxy-2'-fluorocytidine
  modified_base (13)..(13): 2'-O-methyladenosine
  modified_base (14)..(14): 2'-deoxy-2'-fluoroguanosine
  modified_base (15)..(15): gm
  modified_base (16)..(16): 2'-deoxy-2'-fluoroadenosine
  modified_base (17)..(17): um
  modified_base (18)..(18): 2'-deoxy-2'-fluoroadenosine
  modified_base (19)..(19): gm
  modified_base (20)..(20): 2'-deoxy-2'-fluorouridine
  modified_base (21)..(21): um
  modified_base (22)..(22): 2'-deoxy-2'-fluorocytidine
  misc_feature (22)..(23): 5'-phosphonothioate
  modified_base (23)..(23): 2'-O-methyladenosine
uguugguuuugcaggauaguuca

SEQ ID NO: 6497 - RNA, 23 nt, Artificial Sequence
  siRNA antisense strand against b2GPI
  modified_base (1)..(1): 2'-deoxy-2'-fluoroguanosine
  modified_base (2)..(2): um
  misc_feature (2)..(3): 5'-phosphonothioate
  modified_base (3)..(3): 2'-deoxy-2'-fluoroguanosine
  modified_base (4)..(4): um
  modified_base (5)..(5): 2'-deoxy-2'-fluorouridine
  modified_base (6)..(6): gm
  modified_base (7)..(7): 2'-deoxy-2'-fluoroguanosine
  modified_base (8)..(8): um
  modified_base (9)..(9): 2'-deoxy-2'-fluorouridine
  modified_base (10)..(10): um
  modified_base (11)..(11): um
  modified_base (12)..(12): 2'-deoxy-2'-fluoroguanosine
  modified_base (13)..(13): cm
  modified_base (14)..(14): 2'-deoxy-2'-fluoroadenosine
  modified_base (15)..(15): gm
  modified_base (16)..(16): 2'-deoxy-2'-fluoroguanosine
  modified_base (17)..(17): 2'-O-methyladenosine
  modified_base (18)..(18): 2'-deoxy-2'-fluorouridine
  modified_base (19)..(19): 2'-O-methyladenosine
  modified_base (20)..(20): 2'-deoxy-2'-fluoroguanosine
  modified_base (21)..(21): um
  modified_base (22)..(22): 2'-deoxy-2'-fluorouridine
  misc_feature (22)..(23): 5'-phosphonothioate
  modified_base (23)..(23): cm
guguugguuuugcaggauaguuc

SEQ ID NO: 6498 - RNA, 23 nt, Artificial Sequence
  siRNA antisense strand against b2GPI
  modified_base (1)..(1): 2'-deoxy-2'-fluoroadenosine
  modified_base (2)..(2): 2'-O-methyladenosine
  misc_feature (2)..(3): 5'-phosphonothioate
  modified_base (3)..(3): 2'-deoxy-2'-fluoroguanosine
  modified_base (4)..(4): um
  modified_base (5)..(5): 2'-deoxy-2'-fluoroguanosine
  modified_base (6)..(6): um
  modified_base (7)..(7): 2'-deoxy-2'-fluorouridine
  modified_base (8)..(8): gm
  modified_base (9)..(9): 2'-deoxy-2'-fluoroguanosine
  modified_base (10)..(10): um
  modified_base (11)..(11): um
  modified_base (12)..(12): 2'-deoxy-2'-fluorouridine
  modified_base (13)..(13): um
  modified_base (14)..(14): 2'-deoxy-2'-fluoroguanosine
  modified_base (15)..(15): cm
  modified_base (16)..(16): 2'-deoxy-2'-fluoroadenosine
  modified_base (17)..(17): gm
  modified_base (18)..(18): 2'-deoxy-2'-fluoroguanosine
  modified_base (19)..(19): 2'-O-methyladenosine
  modified_base (20)..(20): 2'-deoxy-2'-fluorouridine
  modified_base (21)..(21): 2'-O-methyladenosine
  modified_base (22)..(22): 2'-deoxy-2'-fluoroguanosine
  misc_feature (22)..(23): 5'-phosphonothioate
  modified_base (23)..(23): um
aaguguugguuuugcaggauagu

SEQ ID NO: 6499 - RNA, 23 nt, Artificial Sequence
  siRNA antisense strand against b2GPI
  modified_base (1)..(1): 2'-deoxy-2'-fluoroadenosine
  modified_base (2)..(2): 2'-O-methyladenosine
  misc_feature (2)..(3): 5'-phosphonothioate
  modified_base (3)..(3): 2'-deoxy-2'-fluoroadenosine
  modified_base (4)..(4): gm
  modified_base (5)..(5): 2'-deoxy-2'-fluorouridine
  modified_base (6)..(6): gm
  modified_base (7)..(7): 2'-deoxy-2'-fluorouridine
  modified_base (8)..(8): um
  modified_base (9)..(9): 2'-deoxy-2'-fluoroguanosine
  modified_base (10)..(10): gm
  modified_base (11)..(11): um
  modified_base (12)..(12): 2'-deoxy-2'-fluorouridine
  modified_base (13)..(13): um
  modified_base (14)..(14): 2'-deoxy-2'-fluorouridine
  modified_base (15)..(15): gm
  modified_base (16)..(16): 2'-deoxy-2'-fluorocytidine
  modified_base (17)..(17): 2'-O-methyladenosine
  modified_base (18)..(18): 2'-deoxy-2'-fluoroguanosine
  modified_base (19)..(19): gm
  modified_base (20)..(20): 2'-deoxy-2'-fluoroadenosine
  modified_base (21)..(21): um
  modified_base (22)..(22): 2'-deoxy-2'-fluoroadenosine
  misc_feature (22)..(23): 5'-phosphonothioate
  modified_base (23)..(23): gm
aaaguguugguuuugcaggauag

SEQ ID NO: 6500 - RNA, 23 nt, Artificial Sequence
  siRNA antisense strand against b2GPI
  modified_base (1)..(1): 2'-deoxy-2'-fluorouridine
  modified_base (2)..(2): 2'-O-methyladenosine
  misc_feature (2)..(3): 5'-phosphonothioate
  modified_base (3)..(3): 2'-deoxy-2'-fluoroadenosine
  modified_base (4)..(4): 2'-O-methyladenosine
  modified_base (5)..(5): 2'-deoxy-2'-fluoroguanosine
  modified_base (6)..(6): um
  modified_base (7)..(7): 2'-deoxy-2'-fluoroguanosine
  modified_base (8)..(8): um
  modified_base (9)..(9): 2'-deoxy-2'-fluorouridine
  modified_base (10)..(10): gm
  modified_base (11)..(11): gm
  modified_base (12)..(12): 2'-deoxy-2'-fluorouridine
  modified_base (13)..(13): um
  modified_base (14)..(14): 2'-deoxy-2'-fluorouridine
  modified_base (15)..(15): um
  modified_base (16)..(16): 2'-deoxy-2'-fluoroguanosine
  modified_base (17)..(17): cm
  modified_base (18)..(18): 2'-deoxy-2'-fluoroadenosine
  modified_base (19)..(19): gm
  modified_base (20)..(20): 2'-deoxy-2'-fluoroguanosine
  modified_base (21)..(21): 2'-O-methyladenosine
  modified_base (22)..(22): 2'-deoxy-2'-fluorouridine
  misc_feature (22)..(23): 5'-phosphonothioate
  modified_base (23)..(23): 2'-O-methyladenosine
uaaaguguugguuuugcaggaua

SEQ ID NO: 6501 - RNA, 23 nt, Artificial Sequence
  siRNA antisense strand against b2GPI
  modified_base (1)..(1): 2'-deoxy-2'-fluoroadenosine
  modified_base (2)..(2): um
  misc_feature (2)..(3): 5'-phosphonothioate
  modified_base (3)..(3): 2'-deoxy-2'-fluoroadenosine
  modified_base (4)..(4): 2'-O-methyladenosine
  modified_base (5)..(5): 2'-deoxy-2'-fluoroadenosine
  modified_base (6)..(6): gm
  modified_base (7)..(7): 2'-deoxy-2'-fluorouridine
  modified_base (8)..(8): gm
  modified_base (9)..(9): 2'-deoxy-2'-fluorouridine
  modified_base (10)..(10): um
  modified_base (11)..(11): gm
  modified_base (12)..(12): 2'-deoxy-2'-fluoroguanosine
  modified_base (13)..(13): um
  modified_base (14)..(14): 2'-deoxy-2'-fluorouridine
  modified_base (15)..(15): um
  modified_base (16)..(16): 2'-deoxy-2'-fluorouridine
  modified_base (17)..(17): gm
  modified_base (18)..(18): 2'-deoxy-2'-fluorocytidine
  modified_base (19)..(19): 2'-O-methyladenosine
  modified_base (20)..(20): 2'-deoxy-2'-fluoroguanosine
  modified_base (21)..(21): gm
  modified_base (22)..(22): 2'-deoxy-2'-fluoroadenosine
  misc_feature (22)..(23): 5'-phosphonothioate
  modified_base (23)..(23): um
auaaaguguugguuuugcaggau

SEQ ID NO: 6502 - RNA, 23 nt, Artificial Sequence
  siRNA antisense strand against b2GPI
  modified_base (1)..(1): 2'-deoxy-2'-fluoroadenosine
  modified_base (2)..(2): 2'-O-methyladenosine
  misc_feature (2)..(3): 5'-phosphonothioate
  modified_base (3)..(3): 2'-deoxy-2'-fluorouridine
  modified_base (4)..(4): 2'-O-methyladenosine
  modified_base (5)..(5): 2'-deoxy-2'-fluoroadenosine
  modified_base (6)..(6): 2'-O-methyladenosine
  modified_base (7)..(7): 2'-deoxy-2'-fluoroguanosine
  modified_base (8)..(8): um
  modified_base (9)..(9): 2'-deoxy-2'-fluoroguanosine
  modified_base (10)..(10): um
  modified_base (11)..(11): um
  modified_base (12)..(12): 2'-deoxy-2'-fluoroguanosine
  modified_base (13)..(13): gm
  modified_base (14)..(14): 2'-deoxy-2'-fluorouridine
  modified_base (15)..(15): um
  modified_base (16)..(16): 2'-deoxy-2'-fluorouridine
  modified_base (17)..(17): um
  modified_base (18)..(18): 2'-deoxy-2'-fluoroguanosine
  modified_base (19)..(19): cm
  modified_base (20)..(20): 2'-deoxy-2'-fluoroadenosine
  modified_base (21)..(21): gm
  modified_base (22)..(22): 2'-deoxy-2'-fluoroguanosine
  misc_feature (22)..(23): 5'-phosphonothioate
  modified_base (23)..(23): 2'-O-methyladenosine
aauaaaguguugguuuugcagga

SEQ ID NO: 6503 - RNA, 23 nt, Artificial Sequence
  siRNA antisense strand against b2GPI
  modified_base (1)..(1): 2'-deoxy-2'-fluorouridine
  modified_base (2)..(2): 2'-O-methyladenosine
  misc_feature (2)..(3): 5'-phosphonothioate
  modified_base (3)..(3): 2'-deoxy-2'-fluoroadenosine
  modified_base (4)..(4): um
  modified_base (5)..(5): 2'-deoxy-2'-fluoroadenosine
  modified_base (6)..(6): 2'-O-methyladenosine
  modified_base (7)..(7): 2'-deoxy-2'-fluoroadenosine
  modified_base (8)..(8): gm
  modified_base (9)..(9): 2'-deoxy-2'-fluorouridine
  modified_base (10)..(10): gm
  modified_base (11)..(11): um
  modified_base (12)..(12): 2'-deoxy-2'-fluorouridine
  modified_base (13)..(13): gm
  modified_base (14)..(14): 2'-deoxy-2'-fluoroguanosine
  modified_base (15)..(15): um
  modified_base (16)..(16): 2'-deoxy-2'-fluorouridine
  modified_base (17)..(17): um
  modified_base (18)..(18): 2'-deoxy-2'-fluorouridine
  modified_base (19)..(19): gm
  modified_base (20)..(20): 2'-deoxy-2'-fluorocytidine
  modified_base (21)..(21): 2'-O-methyladenosine
  modified_base (22)..(22): 2'-deoxy-2'-fluoroguanosine
  misc_feature (22)..(23): 5'-phosphonothioate
  modified_base (23)..(23): gm
uaauaaaguguugguuuugcagg

SEQ ID NO: 6504 - RNA, 23 nt, Artificial Sequence
  siRNA antisense strand against b2GPI
  modified_base (1)..(1): 2'-deoxy-2'-fluorouridine
  modified_base (2)..(2): gm
  misc_feature (2)..(3): 5'-phosphonothioate
  modified_base (3)..(3): 2'-deoxy-2'-fluorouridine
  modified_base (4)..(4): 2'-O-methyladenosine
  modified_base (5)..(5): 2'-deoxy-2'-fluoroadenosine
  modified_base (6)..(6): um
  modified_base (7)..(7): 2'-deoxy-2'-fluoroadenosine
  modified_base (8)..(8): 2'-O-methyladenosine
  modified_base (9)..(9): 2'-deoxy-2'-fluoroadenosine
  modified_base (10)..(10): gm
  modified_base (11)..(11): um
  modified_base (12)..(12): 2'-deoxy-2'-fluoroguanosine
  modified_base (13)..(13): um
  modified_base (14)..(14): 2'-deoxy-2'-fluorouridine
  modified_base (15)..(15): gm
  modified_base (16)..(16): 2'-deoxy-2'-fluoroguanosine
  modified_base (17)..(17): um
  modified_base (18)..(18): 2'-deoxy-2'-fluorouridine
  modified_base (19)..(19): um
  modified_base (20)..(20): 2'-deoxy-2'-fluorouridine
  modified_base (21)..(21): gm
  modified_base (22)..(22): 2'-deoxy-2'-fluorocytidine
  misc_feature (22)..(23): 5'-phosphonothioate
  modified_base (23)..(23): 2'-O-methyladenosine
uguaauaaaguguugguuuugca

SEQ ID NO: 6505 - RNA, 23 nt, Artificial Sequence
  siRNA antisense strand against b2GPI
  modified_base (1)..(1): 2'-deoxy-2'-fluorouridine
  modified_base (2)..(2): um
  misc_feature (2)..(3): 5'-phosphonothioate
  modified_base (3)..(3): 2'-deoxy-2'-fluoroguanosine
  modified_base (4)..(4): um
  modified_base (5)..(5): 2'-deoxy-2'-fluoroadenosine
  modified_base (6)..(6): 2'-O-methyladenosine
  modified_base (7)..(7): 2'-deoxy-2'-fluorouridine
  modified_base (8)..(8): 2'-O-methyladenosine
  modified_base (9)..(9): 2'-deoxy-2'-fluoroadenosine
  modified_base (10)..(10): 2'-O-methyladenosine
  modified_base (11)..(11): gm
  modified_base (12)..(12): 2'-deoxy-2'-fluorouridine
  modified_base (13)..(13): gm
  modified_base (14)..(14): 2'-deoxy-2'-fluorouridine
  modified_base (15)..(15): um
  modified_base (16)..(16): 2'-deoxy-2'-fluoroguanosine
  modified_base (17)..(17): gm
  modified_base (18)..(18): 2'-deoxy-2'-fluorouridine
  modified_base (19)..(19): um
  modified_base (20)..(20): 2'-deoxy-2'-fluorouridine
  modified_base (21)..(21): um
  modified_base (22)..(22): 2'-deoxy-2'-fluoroguanosine
  misc_feature (22)..(23): 5'-phosphonothioate
  modified_base (23)..(23): cm
uuguaauaaaguguugguuuugc

SEQ ID NO: 6506 - RNA, 23 nt, Artificial Sequence
  siRNA antisense strand against b2GPI
  modified_base (1)..(1): 2'-deoxy-2'-fluorocytidine
  modified_base (2)..(2): cm
  misc_feature (2)..(3): 5'-phosphonothioate
  modified_base (3)..(3): 2'-deoxy-2'-fluorouridine
  modified_base (4)..(4): um
  modified_base (5)..(5): 2'-deoxy-2'-fluoroguanosine
  modified_base (6)..(6): um
  modified_base (7)..(7): 2'-deoxy-2'-fluoroadenosine
  modified_base (8)..(8): 2'-O-methyladenosine
  modified_base (9)..(9): 2'-deoxy-2'-fluorouridine
  modified_base (10)..(10): 2'-O-methyladenosine
  modified_base (11)..(11): 2'-O-methyladenosine
  modified_base (12)..(12): 2'-deoxy-2'-fluoroadenosine
  modified_base (13)..(13): gm
  modified_base (14)..(14): 2'-deoxy-2'-fluorouridine
  modified_base (15)..(15): gm
  modified_base (16)..(16): 2'-deoxy-2'-fluorouridine
  modified_base (17)..(17): um
  modified_base (18)..(18): 2'-deoxy-2'-fluoroguanosine
  modified_base (19)..(19): gm
  modified_base (20)..(20): 2'-deoxy-2'-fluorouridine
  modified_base (21)..(21): um
  modified_base (22)..(22): 2'-deoxy-2'-fluorouridine
  misc_feature (22)..(23): 5'-phosphonothioate
  modified_base (23)..(23): um
ccuuguaauaaaguguugguuuu

SEQ ID NO: 6507 - RNA, 23 nt, Artificial Sequence
  siRNA antisense strand against b2GPI
  modified_base (1)..(1): 2'-deoxy-2'-fluoroadenosine
  modified_base (2)..(2): um
  misc_feature (2)..(3): 5'-phosphonothioate
  modified_base (3)..(3): 2'-deoxy-2'-fluorocytidine
  modified_base (4)..(4): cm
  modified_base (5)..(5): 2'-deoxy-2'-fluorouridine
  modified_base (6)..(6): um
  modified_base (7)..(7): 2'-deoxy-2'-fluoroguanosine
  modified_base (8)..(8): um
  modified_base (9)..(9): 2'-deoxy-2'-fluoroadenosine
  modified_base (10)..(10): 2'-O-methyladenosine
  modified_base (11)..(11): um
  modified_base (12)..(12): 2'-deoxy-2'-fluoroadenosine
  modified_base (13)..(13): 2'-O-methyladenosine
  modified_base (14)..(14): 2'-deoxy-2'-fluoroadenosine
  modified_base (15)..(15): gm
  modified_base (16)..(16): 2'-deoxy-2'-fluorouridine
  modified_base (17)..(17): gm
  modified_base (18)..(18): 2'-deoxy-2'-fluorouridine
  modified_base (19)..(19): um
  modified_base (20)..(20): 2'-deoxy-2'-fluoroguanosine
  modified_base (21)..(21): gm
  modified_base (22)..(22): 2'-deoxy-2'-fluorouridine
  misc_feature (22)..(23): 5'-phosphonothioate
  modified_base (23)..(23): um
auccuuguaauaaaguguugguu

SEQ ID NO: 6508 - RNA, 23 nt, Artificial Sequence
  siRNA antisense strand against b2GPI
  modified_base (1)..(1): 2'-deoxy-2'-fluorouridine
  modified_base (2)..(2): 2'-O-methyladenosine
  misc_feature (2)..(3): 5'-phosphonothioate
  modified_base (3)..(3): 2'-deoxy-2'-fluorouridine
  modified_base (4)..(4): cm
  modified_base (5)..(5): 2'-deoxy-2'-fluorocytidine
  modified_base (6)..(6): um
  modified_base (7)..(7): 2'-deoxy-2'-fluorouridine
  modified_base (8)..(8): gm
  modified_base (9)..(9): 2'-deoxy-2'-fluorouridine
  modified_base (10)..(10): 2'-O-methyladenosine
  modified_base (11)..(11): 2'-O-methyladenosine
  modified_base (12)..(12): 2'-deoxy-2'-fluorouridine
  modified_base (13)..(13): 2'-O-methyladenosine
  modified_base (14)..(14): 2'-deoxy-2'-fluoroadenosine
  modified_base (15)..(15): 2'-O-methyladenosine
  modified_base (16)..(16): 2'-deoxy-2'-fluoroguanosine
  modified_base (17)..(17): um
  modified_base (18)..(18): 2'-deoxy-2'-fluoroguanosine
  modified_base (19)..(19): um
  modified_base (20)..(20): 2'-deoxy-2'-fluorouridine
  modified_base (21)..(21): gm
  modified_base (22)..(22): 2'-deoxy-2'-fluoroguanosine
  misc_feature (22)..(23): 5'-phosphonothioate
  modified_base (23)..(23): um
uauccuuguaauaaaguguuggu

SEQ ID NO: 6509 - RNA, 23 nt, Artificial Sequence
  siRNA antisense strand against b2GPI
  modified_base (1)..(1): 2'-deoxy-2'-fluorouridine
  modified_base (2)..(2): um
  misc_feature (2)..(3): 5'-phosphonothioate
  modified_base (3)..(3): 2'-deoxy-2'-fluoroadenosine
  modified_base (4)..(4): um
  modified_base (5)..(5): 2'-deoxy-2'-fluorocytidine
  modified_base (6)..(6): cm
  modified_base (7)..(7): 2'-deoxy-2'-fluorouridine
  modified_base (8)..(8): um
  modified_base (9)..(9): 2'-deoxy-2'-fluoroguanosine
  modified_base (10)..(10): um
  modified_base (11)..(11): 2'-O-methyladenosine
  modified_base (12)..(12): 2'-deoxy-2'-fluoroadenosine
  modified_base (13)..(13): um
  modified_base (14)..(14): 2'-deoxy-2'-fluoroadenosine
  modified_base (15)..(15): 2'-O-methyladenosine
  modified_base (16)..(16): 2'-deoxy-2'-fluoroadenosine
  modified_base (17)..(17): gm
  modified_base (18)..(18): 2'-deoxy-2'-fluorouridine
  modified_base (19)..(19): gm
  modified_base (20)..(20): 2'-deoxy-2'-fluorouridine
  modified_base (21)..(21): um
  modified_base (22)..(22): 2'-deoxy-2'-fluoroguanosine
  misc_feature (22)..(23): 5'-phosphonothioate
  modified_base (23)..(23): gm
uuauccuuguaauaaaguguugg

SEQ ID NO: 6510 - RNA, 23 nt, Artificial Sequence
  siRNA antisense strand against b2GPI
  modified_base (1)..(1): 2'-deoxy-2'-fluoroadenosine
  modified_base (2)..(2): 2'-O-methyladenosine
  misc_feature (2)..(3): 5'-phosphonothioate
  modified_base (3)..(3): 2'-deoxy-2'-fluoroadenosine
  modified_base (4)..(4): um
  modified_base (5)..(5): 2'-deoxy-2'-fluoroguanosine
  modified_base (6)..(6): um
  modified_base (7)..(7): 2'-deoxy-2'-fluoroguanosine
  modified_base (8)..(8): gm
  modified_base (9)..(9): 2'-deoxy-2'-fluorocytidine
  modified_base (10)..(10): um
  modified_base (11)..(11): um
  modified_base (12)..(12): 2'-deoxy-2'-fluorouridine
  modified_base (13)..(13): 2'-O-methyladenosine
  modified_base (14)..(14): 2'-deoxy-2'-fluorouridine
  modified_base (15)..(15): cm
  modified_base (16)..(16): 2'-deoxy-2'-fluorocytidine
  modified_base (17)..(17): um
  modified_base (18)..(18): 2'-deoxy-2'-fluorouridine
  modified_base (19)..(19): gm
  modified_base (20)..(20): 2'-deoxy-2'-fluorouridine
  modified_base (21)..(21): 2'-O-methyladenosine
  modified_base (22)..(22): 2'-deoxy-2'-fluoroadenosine
  misc_feature (22)..(23): 5'-phosphonothioate
  modified_base (23)..(23): um
aaauguggcuuuauccuuguaau

SEQ ID NO: 6511 - RNA, 23 nt, Artificial Sequence
  siRNA antisense strand against b2GPI
  modified_base (1)..(1): 2'-deoxy-2'-fluorocytidine
  modified_base (2)..(2): cm
  misc_feature (2)..(3): 5'-phosphonothioate
  modified_base (3)..(3): 2'-deoxy-2'-fluoroadenosine
  modified_base (4)..(4): 2'-O-methyladenosine
  modified_base (5)..(5): 2'-deoxy-2'-fluoroadenosine
  modified_base (6)..(6): um
  modified_base (7)..(7): 2'-deoxy-2'-fluoroguanosine
  modified_base (8)..(8): um
  modified_base (9)..(9): 2'-deoxy-2'-fluoroguanosine
  modified_base (10)..(10): gm
  modified_base (11)..(11): cm
  modified_base (12)..(12): 2'-deoxy-2'-fluorouridine
  modified_base (13)..(13): um
  modified_base (14)..(14): 2'-deoxy-2'-fluorouridine
  modified_base (15)..(15): 2'-O-methyladenosine
  modified_base (16)..(16): 2'-deoxy-2'-fluorouridine
  modified_base (17)..(17): cm
  modified_base (18)..(18): 2'-deoxy-2'-fluorocytidine
  modified_base (19)..(19): um
  modified_base (20)..(20): 2'-deoxy-2'-fluorouridine
  modified_base (21)..(21): gm
  modified_base (22)..(22): 2'-deoxy-2'-fluorouridine
  misc_feature (22)..(23): 5'-phosphonothioate
  modified_base (23)..(23): 2'-O-methyladenosine
ccaaauguggcuuuauccuugua

SEQ ID NO: 6512 - RNA, 23 nt, Artificial Sequence
  siRNA antisense strand against b2GPI
  modified_base (1)..(1): 2'-deoxy-2'-fluoroadenosine
  modified_base (2)..(2): gm
  misc_feature (2)..(3): 5'-phosphonothioate
  modified_base (3)..(3): 2'-deoxy-2'-fluorocytidine
  modified_base (4)..(4): cm
  modified_base (5)..(5): 2'-deoxy-2'-fluoroadenosine
  modified_base (6)..(6): 2'-O-methyladenosine
  modified_base (7)..(7): 2'-deoxy-2'-fluoroadenosine
  modified_base (8)..(8): um
  modified_base (9)..(9): 2'-deoxy-2'-fluoroguanosine
  modified_base (10)..(10): um
  modified_base (11)..(11): gm
  modified_base (12)..(12): 2'-deoxy-2'-fluoroguanosine
  modified_base (13)..(13): cm
  modified_base (14)..(14): 2'-deoxy-2'-fluorouridine
  modified_base (15)..(15): um
  modified_base (16)..(16): 2'-deoxy-2'-fluorouridine
  modified_base (17)..(17): 2'-O-methyladenosine
  modified_base (18)..(18): 2'-deoxy-2'-fluorouridine
  modified_base (19)..(19): cm
  modified_base (20)..(20): 2'-deoxy-2'-fluorocytidine
  modified_base (21)..(21): um
  modified_base (22)..(22): 2'-deoxy-2'-fluorouridine
  misc_feature (22)..(23): 5'-phosphonothioate
  modified_base (23)..(23): gm
agccaaauguggcuuuauccuug

SEQ ID NO: 6513 - RNA, 23 nt, Artificial Sequence
  siRNA antisense strand against b2GPI
  modified_base (1)..(1): 2'-deoxy-2'-fluorouridine
  modified_base (2)..(2): gm
  misc_feature (2)..(3): 5'-phosphonothioate
  modified_base (3)..(3): 2'-deoxy-2'-fluoroguanosine
  modified_base (4)..(4): cm
  modified_base (5)..(5): 2'-deoxy-2'-fluoroadenosine
  modified_base (6)..(6): gm
  modified_base (7)..(7): 2'-deoxy-2'-fluorocytidine
  modified_base (8)..(8): cm
  modified_base (9)..(9): 2'-deoxy-2'-fluoroadenosine
  modified_base (10)..(10): 2'-O-methyladenosine
  modified_base (11)..(11): 2'-O-methyladenosine
  modified_base (12)..(12): 2'-deoxy-2'-fluorouridine
  modified_base (13)..(13): gm
  modified_base (14)..(14): 2'-deoxy-2'-fluorouridine
  modified_base (15)..(15): gm
  modified_base (16)..(16): 2'-deoxy-2'-fluoroguanosine
  modified_base (17)..(17): cm
  modified_base (18)..(18): 2'-deoxy-2'-fluorouridine
  modified_base (19)..(19): um
  modified_base (20)..(20): 2'-deoxy-2'-fluorouridine
  modified_base (21)..(21): 2'-O-methyladenosine
  modified_base (22)..(22): 2'-deoxy-2'-fluorouridine
  misc_feature (22)..(23): 5'-phosphonothioate
  modified_base (23)..(23): cm
uggcagccaaauguggcuuuauc

SEQ ID NO: 6514 - RNA, 23 nt, Artificial Sequence
  siRNA antisense strand against b2GPI
  modified_base (1)..(1): 2'-deoxy-2'-fluoroadenosine
  modified_base (2)..(2): um
  misc_feature (2)..(3): 5'-phosphonothioate
  modified_base (3)..(3): 2'-deoxy-2'-fluoroguanosine
  modified_base (4)..(4): gm
  modified_base (5)..(5): 2'-deoxy-2'-fluorocytidine
  modified_base (6)..(6): 2'-O-methyladenosine
  modified_base (7)..(7): 2'-deoxy-2'-fluoroguanosine
  modified_base (8)..(8): cm
  modified_base (9)..(9): 2'-deoxy-2'-fluorocytidine
  modified_base (10)..(10): 2'-O-methyladenosine
  modified_base (11)..(11): 2'-O-methyladenosine
  modified_base (12)..(12): 2'-deoxy-2'-fluoroadenosine
  modified_base (13)..(13): um
  modified_base (14)..(14): 2'-deoxy-2'-fluoroguanosine
  modified_base (15)..(15): um
  modified_base (16)..(16): 2'-deoxy-2'-fluoroguanosine
  modified_base (17)..(17): gm
  modified_base (18)..(18): 2'-deoxy-2'-fluorocytidine
  modified_base (19)..(19): um
  modified_base (20)..(20): 2'-deoxy-2'-fluorouridine
  modified_base (21)..(21): um
  modified_base (22)..(22): 2'-deoxy-2'-fluoroadenosine
  misc_feature (22)..(23): 5'-phosphonothioate
  modified_base (23)..(23): um
auggcagccaaauguggcuuuau

SEQ ID NO: 6515 - RNA, 23 nt, Artificial Sequence
  siRNA antisense strand against b2GPI
  modified_base (1)..(1): 2'-deoxy-2'-fluorocytidine
  modified_base (2)..(2): 2'-O-methyladenosine
  misc_feature (2)..(3): 5'-phosphonothioate
  modified_base (3)..(3): 2'-deoxy-2'-fluorouridine
  modified_base (4)..(4): gm
  modified_base (5)..(5): 2'-deoxy-2'-fluoroguanosine
  modified_base (6)..(6): cm
  modified_base (7)..(7): 2'-deoxy-2'-fluoroadenosine
  modified_base (8)..(8): gm
  modified_base (9)..(9): 2'-deoxy-2'-fluorocytidine
  modified_base (10)..(10): cm
  modified_base (11)..(11): 2'-O-methyladenosine
  modified_base (12)..(12): 2'-deoxy-2'-fluoroadenosine
  modified_base (13)..(13): 2'-O-methyladenosine
  modified_base (14)..(14): 2'-deoxy-2'-fluorouridine
  modified_base (15)..(15): gm
  modified_base (16)..(16): 2'-deoxy-2'-fluorouridine
  modified_base (17)..(17): gm
  modified_base (18)..(18): 2'-deoxy-2'-fluoroguanosine
  modified_base (19)..(19): cm
  modified_base (20)..(20): 2'-deoxy-2'-fluorouridine
  modified_base (21)..(21): um
  modified_base (22)..(22): 2'-deoxy-2'-fluorouridine
  misc_feature (22)..(23): 5'-phosphonothioate
  modified_base (23)..(23): 2'-O-methyladenosine
cauggcagccaaauguggcuuua

SEQ ID NO: 6516 - RNA, 23 nt, Artificial Sequence
  siRNA antisense strand against b2GPI
  modified_base (1)..(1): 2'-deoxy-2'-fluorouridine
  modified_base (2)..(2): cm
  misc_feature (2)..(3): 5'-phosphonothioate
  modified_base (3)..(3): 2'-deoxy-2'-fluoroadenosine
  modified_base (4)..(4): um
  modified_base (5)..(5): 2'-deoxy-2'-fluoroguanosine
  modified_base (6)..(6): gm
  modified_base (7)..(7): 2'-deoxy-2'-fluorocytidine
  modified_base (8)..(8): 2'-O-methyladenosine
  modified_base (9)..(9): 2'-deoxy-2'-fluoroguanosine
  modified_base (10)..(10): cm
  modified_base (11)..(11): cm
  modified_base (12)..(12): 2'-deoxy-2'-fluoroadenosine
  modified_base (13)..(13): 2'-O-methyladenosine
  modified_base (14)..(14): 2'-deoxy-2'-fluoroadenosine
  modified_base (15)..(15): um
  modified_base (16)..(16): 2'-deoxy-2'-fluoroguanosine
  modified_base (17)..(17): um
  modified_base (18)..(18): 2'-deoxy-2'-fluoroguanosine
  modified_base (19)..(19): gm
  modified_base (20)..(20): 2'-deoxy-2'-fluorocytidine
  modified_base (21)..(21): um
  modified_base (22)..(22): 2'-deoxy-2'-fluorouridine
  misc_feature (22)..(23): 5'-phosphonothioate
  modified_base (23)..(23): um
ucauggcagccaaauguggcuuu

SEQ ID NO: 6517 - RNA, 23 nt, Artificial Sequence
  siRNA antisense strand against b2GPI
  modified_base (1)..(1): 2'-deoxy-2'-fluoroadenosine
  modified_base (2)..(2): um
  misc_feature (2)..(3): 5'-phosphonothioate
  modified_base (3)..(3): 2'-deoxy-2'-fluorocytidine
  modified_base (4)..(4): 2'-O-methyladenosine
  modified_base (5)..(5): 2'-deoxy-2'-fluorouridine
  modified_base (6)..(6): gm
  modified_base (7)..(7): 2'-deoxy-2'-fluoroguanosine
  modified_base (8)..(8): cm
  modified_base (9)..(9): 2'-deoxy-2'-fluoroadenosine
  modified_base (10)..(10): gm
  modified_base (11)..(11): cm
  modified_base (12)..(12): 2'-deoxy-2'-fluorocytidine
  modified_base (13)..(13): 2'-O-methyladenosine
  modified_base (14)..(14): 2'-deoxy-2'-fluoroadenosine
  modified_base (15)..(15): 2'-O-methyladenosine
  modified_base (16)..(16): 2'-deoxy-2'-fluorouridine
  modified_base (17)..(17): gm
  modified_base (18)..(18): 2'-deoxy-2'-fluorouridine
  modified_base (19)..(19): gm
  modified_base (20)..(20): 2'-deoxy-2'-fluoroguanosine
  modified_base (21)..(21): cm
  modified_base (22)..(22): 2'-deoxy-2'-fluorouridine
  misc_feature (22)..(23): 5'-phosphonothioate
  modified_base (23)..(23): um
aucauggcagccaaauguggcuu

SEQ ID NO: 6518 - RNA, 23 nt, Artificial Sequence
  siRNA antisense strand against b2GPI
  modified_base (1)..(1): 2'-deoxy-2'-fluorocytidine
  modified_base (2)..(2): 2'-O-methyladenosine
  misc_feature (2)..(3): 5'-phosphonothioate
  modified_base (3)..(3): 2'-deoxy-2'-fluorouridine
  modified_base (4)..(4): cm
  modified_base (5)..(5): 2'-deoxy-2'-fluoroadenosine
  modified_base (6)..(6): um
  modified_base (7)..(7): 2'-deoxy-2'-fluoroguanosine
  modified_base (8)..(8): gm
  modified_base (9)..(9): 2'-deoxy-2'-fluorocytidine
  modified_base (10)..(10): 2'-O-methyladenosine
  modified_base (11)..(11): gm
  modified_base (12)..(12): 2'-deoxy-2'-fluorocytidine
  modified_base (13)..(13): cm
  modified_base (14)..(14): 2'-deoxy-2'-fluoroadenosine
  modified_base (15)..(15): 2'-O-methyladenosine
  modified_base (16)..(16): 2'-deoxy-2'-fluoroadenosine
  modified_base (17)..(17): um
  modified_base (18)..(18): 2'-deoxy-2'-fluoroguanosine
  modified_base (19)..(19): um
  modified_base (20)..(20): 2'-deoxy-2'-fluoroguanosine
  modified_base (21)..(21): gm
  modified_base (22)..(22): 2'-deoxy-2'-fluorocytidine
  misc_feature (22)..(23): 5'-phosphonothioate
  modified_base (23)..(23): um
caucauggcagccaaauguggcu

SEQ ID NO: 6519 - RNA, 23 nt, Artificial Sequence
  siRNA antisense strand against b2GPI
  modified_base (1)..(1): 2'-deoxy-2'-fluorocytidine
  modified_base (2)..(2): cm
  misc_feature (2)..(3): 5'-phosphonothioate
  modified_base (3)..(3): 2'-deoxy-2'-fluoroadenosine
  modified_base (4)..(4): um
  modified_base (5)..(5): 2'-deoxy-2'-fluorocytidine
  modified_base (6)..(6): 2'-O-methyladenosine
  modified_base (7)..(7): 2'-deoxy-2'-fluorouridine
  modified_base (8)..(8): gm
  modified_base (9)..(9): 2'-deoxy-2'-fluoroguanosine
  modified_base (10)..(10): cm
  modified_base (11)..(11): 2'-O-methyladenosine
  modified_base (12)..(12): 2'-deoxy-2'-fluoroguanosine
  modified_base (13)..(13): cm
  modified_base (14)..(14): 2'-deoxy-2'-fluorocytidine
  modified_base (15)..(15): 2'-O-methyladenosine
  modified_base (16)..(16): 2'-deoxy-2'-fluoroadenosine
  modified_base (17)..(17): 2'-O-methyladenosine
  modified_base (18)..(18): 2'-deoxy-2'-fluorouridine
  modified_base (19)..(19): gm
  modified_base (20)..(20): 2'-deoxy-2'-fluorouridine
  modified_base (21)..(21): gm
  modified_base (22)..(22): 2'-deoxy-2'-fluoroguanosine
  misc_feature (22)..(23): 5'-phosphonothioate
  modified_base (23)..(23): cm
ccaucauggcagccaaauguggc

SEQ ID NO: 6520 - RNA, 23 nt, Artificial Sequence
  siRNA antisense strand against b2GPI
  modified_base (1)..(1): 2'-deoxy-2'-fluorouridine
  modified_base (2)..(2): cm
  misc_feature (2)..(3): 5'-phosphonothioate
  modified_base (3)..(3): 2'-deoxy-2'-fluorocytidine
  modified_base (4)..(4): 2'-O-methyladenosine
  modified_base (5)..(5): 2'-deoxy-2'-fluorouridine
  modified_base (6)..(6): cm
  modified_base (7)..(7): 2'-deoxy-2'-fluoroadenosine
  modified_base (8)..(8): um
  modified_base (9)..(9): 2'-deoxy-2'-fluoroguanosine
  modified_base (10)..(10): gm
  modified_base (11)..(11): cm
  modified_base (12)..(12): 2'-deoxy-2'-fluoroadenosine
  modified_base (13)..(13): gm
  modified_base (14)..(14): 2'-deoxy-2'-fluorocytidine
  modified_base (15)..(15): cm
  modified_base (16)..(16): 2'-deoxy-2'-fluoroadenosine
  modified_base (17)..(17): 2'-O-methyladenosine
  modified_base (18)..(18): 2'-deoxy-2'-fluoroadenosine
  modified_base (19)..(19): um
  modified_base (20)..(20): 2'-deoxy-2'-fluoroguanosine
  modified_base (21)..(21): um
  modified_base (22)..(22): 2'-deoxy-2'-fluoroguanosine
  misc_feature (22)..(23): 5'-phosphonothioate
  modified_base (23)..(23): gm
uccaucauggcagccaaaugugg

SEQ ID NO: 6521 - RNA, 23 nt, Artificial Sequence
  siRNA antisense strand against b2GPI
  modified_base (1)..(1): 2'-deoxy-2'-fluoroadenosine
  modified_base (2)..(2): um
  misc_feature (2)..(3): 5'-phosphonothioate
  modified_base (3)..(3): 2'-deoxy-2'-fluoroadenosine
  modified_base (4)..(4): um
  modified_base (5)..(5): 2'-deoxy-2'-fluorocytidine
  modified_base (6)..(6): cm
  modified_base (7)..(7): 2'-deoxy-2'-fluoroadenosine
  modified_base (8)..(8): um
  modified_base (9)..(9): 2'-deoxy-2'-fluorocytidine
  modified_base (10)..(10): 2'-O-methyladenosine
  modified_base (11)..(11): um
  modified_base (12)..(12): 2'-deoxy-2'-fluoroguanosine
  modified_base (13)..(13): gm
  modified_base (14)..(14): 2'-deoxy-2'-fluorocytidine
  modified_base (15)..(15): 2'-O-methyladenosine
  modified_base (16)..(16): 2'-deoxy-2'-fluoroguanosine
  modified_base (17)..(17): cm
  modified_base (18)..(18): 2'-deoxy-2'-fluorocytidine
  modified_base (19)..(19): 2'-O-methyladenosine
  modified_base (20)..(20): 2'-deoxy-2'-fluoroadenosine
  modified_base (21)..(21): 2'-O-methyladenosine
  modified_base (22)..(22): 2'-deoxy-2'-fluorouridine
  misc_feature (22)..(23): 5'-phosphonothioate
  modified_base (23)..(23): gm
auauccaucauggcagccaaaug

SEQ ID NO: 6522 - RNA, 23 nt, Artificial Sequence
  siRNA antisense strand against b2GPI
  modified_base (1)..(1): 2'-deoxy-2'-fluoroadenosine
  modified_base (2)..(2): 2'-O-methyladenosine
  misc_feature (2)..(3): 5'-phosphonothioate
  modified_base (3)..(3): 2'-deoxy-2'-fluorouridine
  modified_base (4)..(4): 2'-O-methyladenosine
  modified_base (5)..(5): 2'-deoxy-2'-fluorouridine
  modified_base (6)..(6): cm
  modified_base (7)..(7): 2'-deoxy-2'-fluorocytidine
  modified_base (8)..(8): 2'-O-methyladenosine
  modified_base (9)..(9): 2'-deoxy-2'-fluorouridine
  modified_base (10)..(10): cm
  modified_base (11)..(11): 2'-O-methyladenosine
  modified_base (12)..(12): 2'-deoxy-2'-fluorouridine
  modified_base (13)..(13): gm
  modified_base (14)..(14): 2'-deoxy-2'-fluoroguanosine
  modified_base (15)..(15): cm
  modified_base (16)..(16): 2'-deoxy-2'-fluoroadenosine
  modified_base (17)..(17): gm
  modified_base (18)..(18): 2'-deoxy-2'-fluorocytidine
  modified_base (19)..(19): cm
  modified_base (20)..(20): 2'-deoxy-2'-fluoroadenosine
  modified_base (21)..(21): 2'-O-methyladenosine
  modified_base (22)..(22): 2'-deoxy-2'-fluoroadenosine
  misc_feature (22)..(23): 5'-phosphonothioate
  modified_base (23)..(23): um
aauauccaucauggcagccaaau

SEQ ID NO: 6523 - RNA, 23 nt, Artificial Sequence
  siRNA antisense strand against b2GPI
  modified_base (1)..(1): 2'-deoxy-2'-fluoroadenosine
  modified_base (2)..(2): gm
  misc_feature (2)..(3): 5'-phosphonothioate
  modified_base (3)..(3): 2'-deoxy-2'-fluoroadenosine
  modified_base (4)..(4): 2'-O-methyladenosine
  modified_base (5)..(5): 2'-deoxy-2'-fluorouridine
  modified_base (6)..(6): 2'-O-methyladenosine
  modified_base (7)..(7): 2'-deoxy-2'-fluorouridine
  modified_base (8)..(8): cm
  modified_base (9)..(9): 2'-deoxy-2'-fluorocytidine
  modified_base (10)..(10): 2'-O-methyladenosine
  modified_base (11)..(11): um
  modified_base (12)..(12): 2'-deoxy-2'-fluorocytidine
  modified_base (13)..(13): 2'-O-methyladenosine
  modified_base (14)..(14): 2'-deoxy-2'-fluorouridine
  modified_base (15)..(15): gm
  modified_base (16)..(16): 2'-deoxy-2'-fluoroguanosine
  modified_base (17)..(17): cm
  modified_base (18)..(18): 2'-deoxy-2'-fluoroadenosine
  modified_base (19)..(19): gm
  modified_base (20)..(20): 2'-deoxy-2'-fluorocytidine
  modified_base (21)..(21): cm
  modified_base (22)..(22): 2'-deoxy-2'-fluoroadenosine
  misc_feature (22)..(23): 5'-phosphonothioate
  modified_base (23)..(23): 2'-O-methyladenosine
agaauauccaucauggcagccaa

SEQ ID NO: 6524 - RNA, 23 nt, Artificial Sequence
  siRNA antisense strand against b2GPI
  modified_base (1)..(1): 2'-deoxy-2'-fluoroguanosine
  modified_base (2)..(2): 2'-O-methyladenosine
  misc_feature (2)..(3): 5'-phosphonothioate
  modified_base (3)..(3): 2'-deoxy-2'-fluoroguanosine
  modified_base (4)..(4): 2'-O-methyladenosine
  modified_base (5)..(5): 2'-deoxy-2'-fluoroadenosine
  modified_base (6)..(6): um
  modified_base (7)..(7): 2'-deoxy-2'-fluoroadenosine
  modified_base (8)..(8): um
  modified_base (9)..(9): 2'-deoxy-2'-fluorocytidine
  modified_base (10)..(10): cm
  modified_base (11)..(11): 2'-O-methyladenosine
  modified_base (12)..(12): 2'-deoxy-2'-fluorouridine
  modified_base (13)..(13): cm
  modified_base (14)..(14): 2'-deoxy-2'-fluoroadenosine
  modified_base (15)..(15): um
  modified_base (16)..(16): 2'-deoxy-2'-fluoroguanosine
  modified_base (17)..(17): gm
  modified_base (18)..(18): 2'-deoxy-2'-fluorocytidine
  modified_base (19)..(19): 2'-O-methyladenosine
  modified_base (20)..(20): 2'-deoxy-2'-fluoroguanosine
  modified_base (21)..(21): cm
  modified_base (22)..(22): 2'-deoxy-2'-fluorocytidine
  misc_feature (22)..(23): 5'-phosphonothioate
  modified_base (23)..(23): 2'-O-methyladenosine
gagaauauccaucauggcagcca

SEQ ID NO: 6525 - RNA, 23 nt, Artificial Sequence
  siRNA antisense strand against b2GPI
  modified_base (1)..(1): 2'-deoxy-2'-fluorocytidine
  modified_base (2)..(2): 2'-O-methyladenosine
  misc_feature (2)..(3): 5'-phosphonothioate
  modified_base (3)..(3): 2'-deoxy-2'-fluoroguanosine
  modified_base (4)..(4): 2'-O-methyladenosine
  modified_base (5)..(5): 2'-deoxy-2'-fluoroguanosine
  modified_base (6)..(6): 2'-O-methyladenosine
  modified_base (7)..(7): 2'-deoxy-2'-fluoroadenosine
  modified_base (8)..(8): um
  modified_base (9)..(9): 2'-deoxy-2'-fluoroadenosine
  modified_base (10)..(10): um
  modified_base (11)..(11): cm
  modified_base (12)..(12): 2'-deoxy-2'-fluorocytidine
  modified_base (13)..(13): 2'-O-methyladenosine
  modified_base (14)..(14): 2'-deoxy-2'-fluorouridine
  modified_base (15)..(15): cm
  modified_base (16)..(16): 2'-deoxy-2'-fluoroadenosine
  modified_base (17)..(17): um
  modified_base (18)..(18): 2'-deoxy-2'-fluoroguanosine
  modified_base (19)..(19): gm
  modified_base (20)..(20): 2'-deoxy-2'-fluorocytidine
  modified_base (21)..(21): 2'-O-methyladenosine
  modified_base (22)..(22): 2'-deoxy-2'-fluoroguanosine
  misc_feature (22)..(23): 5'-phosphonothioate
  modified_base (23)..(23): cm
cagagaauauccaucauggcagc

SEQ ID NO: 6526 - RNA, 23 nt, Artificial Sequence
  siRNA antisense strand against b2GPI
  modified_base (1)..(1): 2'-deoxy-2'-fluorocytidine
  modified_base (2)..(2): cm
  misc_feature (2)..(3): 5'-phosphonothioate
  modified_base (3)..(3): 2'-deoxy-2'-fluoroadenosine
  modified_base (4)..(4): gm
  modified_base (5)..(5): 2'-deoxy-2'-fluoroadenosine
  modified_base (6)..(6): gm
  modified_base (7)..(7): 2'-deoxy-2'-fluoroadenosine
  modified_base (8)..(8): 2'-O-methyladenosine
  modified_base (9)..(9): 2'-deoxy-2'-fluorouridine
  modified_base (10)..(10): 2'-O-methyladenosine
  modified_base (11)..(11): um
  modified_base (12)..(12): 2'-deoxy-2'-fluorocytidine
  modified_base (13)..(13): cm
  modified_base (14)..(14): 2'-deoxy-2'-fluoroadenosine
  modified_base (15)..(15): um
  modified_base (16)..(16): 2'-deoxy-2'-fluorocytidine
  modified_base (17)..(17): 2'-O-methyladenosine
  modified_base (18)..(18): 2'-deoxy-2'-fluorouridine
  modified_base (19)..(19): gm
  modified_base (20)..(20): 2'-deoxy-2'-fluoroguanosine
  modified_base (21)..(21): cm
  modified_base (22)..(22): 2'-deoxy-2'-fluoroadenosine
  misc_feature (22)..(23): 5'-phosphonothioate
  modified_base (23)..(23): gm
ccagagaauauccaucauggcag

SEQ ID NO: 6527 - RNA, 23 nt, Artificial Sequence
  siRNA antisense strand against b2GPI
  modified_base (1)..(1): 2'-deoxy-2'-fluoroadenosine
  modified_base (2)..(2): um
  misc_feature (2)..(3): 5'-phosphonothioate
  modified_base (3)..(3): 2'-deoxy-2'-fluorocytidine
  modified_base (4)..(4): cm
  modified_base (5)..(5): 2'-deoxy-2'-fluoroadenosine
  modified_base (6)..(6): gm
  modified_base (7)..(7): 2'-deoxy-2'-fluoroadenosine
  modified_base (8)..(8): gm
  modified_base (9)..(9): 2'-deoxy-2'-fluoroadenosine
  modified_base (10)..(10): 2'-O-methyladenosine
  modified_base (11)..(11): um
  modified_base (12)..(12): 2'-deoxy-2'-fluoroadenosine
  modified_base (13)..(13): um
  modified_base (14)..(14): 2'-deoxy-2'-fluorocytidine
  modified_base (15)..(15): cm
  modified_base (16)..(16): 2'-deoxy-2'-fluoroadenosine
  modified_base (17)..(17): um
  modified_base (18)..(18): 2'-deoxy-2'-fluorocytidine
  modified_base (19)..(19): 2'-O-methyladenosine
  modified_base (20)..(20): 2'-deoxy-2'-fluorouridine
  modified_base (21)..(21): gm
  modified_base (22)..(22): 2'-deoxy-2'-fluoroguanosine
  misc_feature (22)..(23): 5'-phosphonothioate
  modified_base (23)..(23): cm
auccagagaauauccaucauggc

SEQ ID NO: 6528 - RNA, 23 nt, Artificial Sequence
  siRNA antisense strand against b2GPI
  modified_base (1)..(1): 2'-deoxy-2'-fluorocytidine
  modified_base (2)..(2): 2'-O-methyladenosine
  misc_feature (2)..(3): 5'-phosphonothioate
  modified_base (3)..(3): 2'-deoxy-2'-fluorouridine
  modified_base (4)..(4): cm
  modified_base (5)..(5): 2'-deoxy-2'-fluorocytidine
  modified_base (6)..(6): 2'-O-methyladenosine
  modified_base (7)..(7): 2'-deoxy-2'-fluoroguanosine
  modified_base (8)..(8): 2'-O-methyladenosine
  modified_base (9)..(9): 2'-deoxy-2'-fluoroguanosine
  modified_base (10)..(10): 2'-O-methyladenosine
  modified_base (11)..(11): 2'-O-methyladenosine
  modified_base (12)..(12): 2'-deoxy-2'-fluorouridine
  modified_base (13)..(13): 2'-O-methyladenosine
  modified_base (14)..(14): 2'-deoxy-2'-fluorouridine
  modified_base (15)..(15): cm
  modified_base (16)..(16): 2'-deoxy-2'-fluorocytidine
  modified_base (17)..(17): 2'-O-methyladenosine
  modified_base (18)..(18): 2'-deoxy-2'-fluorouridine
  modified_base (19)..(19): cm
  modified_base (20)..(20): 2'-deoxy-2'-fluoroadenosine
  modified_base (21)..(21): um
  modified_base (22)..(22): 2'-deoxy-2'-fluoroguanosine
  misc_feature (22)..(23): 5'-phosphonothioate
  modified_base (23)..(23): gm
cauccagagaauauccaucaugg

SEQ ID NO: 6529 - RNA, 23 nt, Artificial Sequence
  siRNA antisense strand against b2GPI
  modified_base (1)..(1): 2'-deoxy-2'-fluoroguanosine
  modified_base (2)..(2): gm
  misc_feature (2)..(3): 5'-phosphonothioate
  modified_base (3)..(3): 2'-deoxy-2'-fluorocytidine
  modified_base (4)..(4): cm
  modified_base (5)..(5): 2'-deoxy-2'-fluoroadenosine
  modified_base (6)..(6): um
  modified_base (7)..(7): 2'-deoxy-2'-fluorocytidine
  modified_base (8)..(8): cm
  modified_base (9)..(9): 2'-deoxy-2'-fluoroadenosine
  modified_base (10)..(10): gm
  modified_base (11)..(11): 2'-O-methyladenosine
  modified_base (12)..(12): 2'-deoxy-2'-fluoroguanosine
  modified_base (13)..(13): 2'-O-methyladenosine
  modified_base (14)..(14): 2'-deoxy-2'-fluoroadenosine
  modified_base (15)..(15): um
  modified_base (16)..(16): 2'-deoxy-2'-fluoroadenosine
  modified_base (17)..(17): um
  modified_base (18)..(18): 2'-deoxy-2'-fluorocytidine
  modified_base (19)..(19): cm
  modified_base (20)..(20): 2'-deoxy-2'-fluoroadenosine
  modified_base (21)..(21): um
  modified_base (22)..(22): 2'-deoxy-2'-fluorocytidine
  misc_feature (22)..(23): 5'-phosphonothioate
  modified_base (23)..(23): 2'-O-methyladenosine
ggccauccagagaauauccauca

SEQ ID NO: 6530 - RNA, 23 nt, Artificial Sequence
  siRNA antisense strand against b2GPI
  modified_base (1)..(1): 2'-deoxy-2'-fluorouridine
  modified_base (2)..(2): um
  misc_feature (2)..(3): 5'-phosphonothioate
  modified_base (3)..(3): 2'-deoxy-2'-fluorocytidine
  modified_base (4)..(4): cm
  modified_base (5)..(5): 2'-deoxy-2'-fluoroguanosine
  modified_base (6)..(6): gm
  modified_base (7)..(7): 2'-deoxy-2'-fluoroguanosine
  modified_base (8)..(8): cm
  modified_base (9)..(9): 2'-deoxy-2'-fluorocytidine
  modified_base (10)..(10): 2'-O-methyladenosine
  modified_base (11)..(11): um
  modified_base (12)..(12): 2'-deoxy-2'-fluorocytidine
  modified_base (13)..(13): cm
  modified_base (14)..(14): 2'-deoxy-2'-fluoroadenosine
  modified_base (15)..(15): gm
  modified_base (16)..(16): 2'-deoxy-2'-fluoroadenosine
  modified_base (17)..(17): gm
  modified_base (18)..(18): 2'-deoxy-2'-fluoroadenosine
  modified_base (19)..(19): 2'-O-methyladenosine
  modified_base (20)..(20): 2'-deoxy-2'-fluorouridine
  modified_base (21)..(21): 2'-O-methyladenosine
  modified_base (22)..(22): 2'-deoxy-2'-fluorouridine
  misc_feature (22)..(23): 5'-phosphonothioate
  modified_base (23)..(23): cm
uuccgggccauccagagaauauc

SEQ ID NO: 6531 - RNA, 23 nt, Artificial Sequence
  siRNA antisense strand against b2GPI
  modified_base (1)..(1): 2'-deoxy-2'-fluorouridine
  modified_base (2)..(2): cm
  misc_feature (2)..(3): 5'-phosphonothioate
  modified_base (3)..(3): 2'-deoxy-2'-fluorouridine
  modified_base (4)..(4): um
  modified_base (5)..(5): 2'-deoxy-2'-fluorocytidine
  modified_base (6)..(6): cm
  modified_base (7)..(7): 2'-deoxy-2'-fluoroguanosine
  modified_base (8)..(8): gm
  modified_base (9)..(9): 2'-deoxy-2'-fluoroguanosine
  modified_base (10)..(10): cm
  modified_base (11)..(11): cm
  modified_base (12)..(12): 2'-deoxy-2'-fluoroadenosine
  modified_base (13)..(13): um
  modified_base (14)..(14): 2'-deoxy-2'-fluorocytidine
  modified_base (15)..(15): cm
  modified_base (16)..(16): 2'-deoxy-2'-fluoroadenosine
  modified_base (17)..(17): gm
  modified_base (18)..(18): 2'-deoxy-2'-fluoroadenosine
  modified_base (19)..(19): gm
  modified_base (20)..(20): 2'-deoxy-2'-fluoroadenosine
  modified_base (21)..(21): 2'-O-methyladenosine
  modified_base (22)..(22): 2'-deoxy-2'-fluorouridine
  misc_feature (22)..(23): 5'-phosphonothioate
  modified_base (23)..(23): 2'-O-methyladenosine
ucuuccgggccauccagagaaua

SEQ ID NO: 6532 - RNA, 23 nt, Artificial Sequence
  siRNA antisense strand against b2GPI
  modified_base (1)..(1): 2'-deoxy-2'-fluorouridine
  modified_base (2)..(2): um
  misc_feature (2)..(3): 5'-phosphonothioate
  modified_base (3)..(3): 2'-deoxy-2'-fluorocytidine
  modified_base (4)..(4): um
  modified_base (5)..(5): 2'-deoxy-2'-fluorouridine
  modified_base (6)..(6): cm
  modified_base (7)..(7): 2'-deoxy-2'-fluorocytidine
  modified_base (8)..(8): gm
  modified_base (9)..(9): 2'-deoxy-2'-fluoroguanosine
  modified_base (10)..(10): gm
  modified_base (11)..(11): cm
  modified_base (12)..(12): 2'-deoxy-2'-fluorocytidine
  modified_base (13)..(13): 2'-O-methyladenosine
  modified_base (14)..(14): 2'-deoxy-2'-fluorouridine
  modified_base (15)..(15): cm
  modified_base (16)..(16): 2'-deoxy-2'-fluorocytidine
  modified_base (17)..(17): 2'-O-methyladenosine
  modified_base (18)..(18): 2'-deoxy-2'-fluoroguanosine
  modified_base (19)..(19): 2'-O-methyladenosine
  modified_base (20)..(20): 2'-deoxy-2'-fluoroguanosine
  modified_base (21)..(21): 2'-O-methyladenosine
  modified_base (22)..(22): 2'-deoxy-2'-fluoroadenosine
  misc_feature (22)..(23): 5'-phosphonothioate
  modified_base (23)..(23): um
uucuuccgggccauccagagaau

SEQ ID NO: 6533 - RNA, 23 nt, Artificial Sequence
  siRNA antisense strand against b2GPI
  modified_base (1)..(1): 2'-deoxy-2'-fluorouridine
  modified_base (2)..(2): um
  misc_feature (2)..(3): 5'-phosphonothioate
  modified_base (3)..(3): 2'-deoxy-2'-fluorouridine
  modified_base (4)..(4): cm
  modified_base (5)..(5): 2'-deoxy-2'-fluorouridine
  modified_base (6)..(6): um
  modified_base (7)..(7): 2'-deoxy-2'-fluorocytidine
  modified_base (8)..(8): cm
  modified_base (9)..(9): 2'-deoxy-2'-fluoroguanosine
  modified_base (10)..(10): gm
  modified_base (11)..(11): gm
  modified_base (12)..(12): 2'-deoxy-2'-fluorocytidine
  modified_base (13)..(13): cm
  modified_base (14)..(14): 2'-deoxy-2'-fluoroadenosine
  modified_base (15)..(15): um
  modified_base (16)..(16): 2'-deoxy-2'-fluorocytidine
  modified_base (17)..(17): cm
  modified_base (18)..(18): 2'-deoxy-2'-fluoroadenosine
  modified_base (19)..(19): gm
  modified_base (20)..(20): 2'-deoxy-2'-fluoroadenosine
  modified_base (21)..(21): gm
  modified_base (22)..(22): 2'-deoxy-2'-fluoroadenosine
  misc_feature (22)..(23): 5'-phosphonothioate
  modified_base (23)..(23): 2'-O-methyladenosine
uuucuuccgggccauccagagaa

SEQ ID NO: 6534 - RNA, 23 nt, Artificial Sequence
  siRNA antisense strand against b2GPI
  modified_base (1)..(1): 2'-deoxy-2'-fluoroadenosine
  modified_base (2)..(2): um
  misc_feature (2)..(3): 5'-phosphonothioate
  modified_base (3)..(3): 2'-deoxy-2'-fluorouridine
  modified_base (4)..(4): um
  modified_base (5)..(5): 2'-deoxy-2'-fluorocytidine
  modified_base (6)..(6): um
  modified_base (7)..(7): 2'-deoxy-2'-fluorouridine
  modified_base (8)..(8): cm
  modified_base (9)..(9): 2'-deoxy-2'-fluorocytidine
  modified_base (10)..(10): gm
  modified_base (11)..(11): gm
  modified_base (12)..(12): 2'-deoxy-2'-fluoroguanosine
  modified_base (13)..(13): cm
  modified_base (14)..(14): 2'-deoxy-2'-fluorocytidine
  modified_base (15)..(15): 2'-O-methyladenosine
  modified_base (16)..(16): 2'-deoxy-2'-fluorouridine
  modified_base (17)..(17): cm
  modified_base (18)..(18): 2'-deoxy-2'-fluorocytidine
  modified_base (19)..(19): 2'-O-methyladenosine
  modified_base (20)..(20): 2'-deoxy-2'-fluoroguanosine
  modified_base (21)..(21): 2'-O-methyladenosine
  modified_base (22)..(22): 2'-deoxy-2'-fluoroguanosine
  misc_feature (22)..(23): 5'-phosphonothioate
  modified_base (23)..(23): 2'-O-methyladenosine
auuucuuccgggccauccagaga

SEQ ID NO: 6535 - RNA, 23 nt, Artificial Sequence
  siRNA antisense strand against b2GPI
  modified_base (1)..(1): 2'-deoxy-2'-fluorouridine
  modified_base (2)..(2): 2'-O-methyladenosine
  misc_feature (2)..(3): 5'-phosphonothioate
  modified_base (3)..(3): 2'-deoxy-2'-fluorouridine
  modified_base (4)..(4): um
  modified_base (5)..(5): 2'-deoxy-2'-fluorouridine
  modified_base (6)..(6): cm
  modified_base (7)..(7): 2'-deoxy-2'-fluorouridine
  modified_base (8)..(8): um
  modified_base (9)..(9): 2'-deoxy-2'-fluorocytidine
  modified_base (10)..(10): cm
  modified_base (11)..(11): gm
  modified_base (12)..(12): 2'-deoxy-2'-fluoroguanosine
  modified_base (13)..(13): gm
  modified_base (14)..(14): 2'-deoxy-2'-fluorocytidine
  modified_base (15)..(15): cm
  modified_base (16)..(16): 2'-deoxy-2'-fluoroadenosine
  modified_base (17)..(17): um
  modified_base (18)..(18): 2'-deoxy-2'-fluorocytidine
  modified_base (19)..(19): cm
  modified_base (20)..(20): 2'-deoxy-2'-fluoroadenosine
  modified_base (21)..(21): gm
  modified_base (22)..(22): 2'-deoxy-2'-fluoroadenosine
  misc_feature (22)..(23): 5'-phosphonothioate
  modified_base (23)..(23): gm
uauuucuuccgggccauccagag

SEQ ID NO: 6536 - RNA, 23 nt, Artificial Sequence
  siRNA antisense strand against b2GPI
  modified_base (1)..(1): 2'-deoxy-2'-fluorouridine
  modified_base (2)..(2): cm
  misc_feature (2)..(3): 5'-phosphonothioate
  modified_base (3)..(3): 2'-deoxy-2'-fluorouridine
  modified_base (4)..(4): 2'-O-methyladenosine
  modified_base (5)..(5): 2'-deoxy-2'-fluorouridine
  modified_base (6)..(6): um
  modified_base (7)..(7): 2'-deoxy-2'-fluorouridine
  modified_base (8)..(8): cm
  modified_base (9)..(9): 2'-deoxy-2'-fluorouridine
  modified_base (10)..(10): um
  modified_base (11)..(11): cm
  modified_base (12)..(12): 2'-deoxy-2'-fluorocytidine
  modified_base (13)..(13): gm
  modified_base (14)..(14): 2'-deoxy-2'-fluoroguanosine
  modified_base (15)..(15): gm
  modified_base (16)..(16): 2'-deoxy-2'-fluorocytidine
  modified_base (17)..(17): cm
  modified_base (18)..(18): 2'-deoxy-2'-fluoroadenosine
  modified_base (19)..(19): um
  modified_base (20)..(20): 2'-deoxy-2'-fluorocytidine
  modified_base (21)..(21): cm
  modified_base (22)..(22): 2'-deoxy-2'-fluoroadenosine
  misc_feature (22)..(23): 5'-phosphonothioate
  modified_base (23)..(23): gm
ucuauuucuuccgggccauccag

SEQ ID NO: 6537 - RNA, 23 nt, Artificial Sequence
  siRNA antisense strand against b2GPI
  modified_base (1)..(1): 2'-deoxy-2'-fluorouridine
  modified_base (2)..(2): um
  misc_feature (2)..(3): 5'-phosphonothioate
  modified_base (3)..(3): 2'-deoxy-2'-fluorocytidine
  modified_base (4)..(4): um
  modified_base (5)..(5): 2'-deoxy-2'-fluoroadenosine
  modified_base (6)..(6): um
  modified_base (7)..(7): 2'-deoxy-2'-fluorouridine
  modified_base (8)..(8): um
  modified_base (9)..(9): 2'-deoxy-2'-fluorocytidine
  modified_base (10)..(10): um
  modified_base (11)..(11): um
  modified_base (12)..(12): 2'-deoxy-2'-fluorocytidine
  modified_base (13)..(13): cm
  modified_base (14)..(14): 2'-deoxy-2'-fluoroguanosine
  modified_base (15)..(15): gm
  modified_base (16)..(16): 2'-deoxy-2'-fluoroguanosine
  modified_base (17)..(17): cm
  modified_base (18)..(18): 2'-deoxy-2'-fluorocytidine
  modified_base (19)..(19): 2'-O-methyladenosine
  modified_base (20)..(20): 2'-deoxy-2'-fluorouridine
  modified_base (21)..(21): cm
  modified_base (22)..(22): 2'-deoxy-2'-fluorocytidine
  misc_feature (22)..(23): 5'-phosphonothioate
  modified_base (23)..(23): 2'-O-methyladenosine
uucuauuucuuccgggccaucca

SEQ ID NO: 6538 - RNA, 23 nt, Artificial Sequence
  siRNA antisense strand against b2GPI
  modified_base (1)..(1): 2'-deoxy-2'-fluoroadenosine
  modified_base (2)..(2): um
  misc_feature (2)..(3): 5'-phosphonothioate
  modified_base (3)..(3): 2'-deoxy-2'-fluorouridine
  modified_base (4)..(4): cm
  modified_base (5)..(5): 2'-deoxy-2'-fluorouridine
  modified_base (6)..(6): 2'-O-methyladenosine
  modified_base (7)..(7): 2'-deoxy-2'-fluorouridine
  modified_base (8)..(8): um
  modified_base (9)..(9): 2'-deoxy-2'-fluorouridine
  modified_base (10)..(10): cm
  modified_base (11)..(11): um
  modified_base (12)..(12): 2'-deoxy-2'-fluorouridine
  modified_base (13)..(13): cm
  modified_base (14)..(14): 2'-deoxy-2'-fluorocytidine
  modified_base (15)..(15): gm
  modified_base (16)..(16): 2'-deoxy-2'-fluoroguanosine
  modified_base (17)..(17): gm
  modified_base (18)..(18): 2'-deoxy-2'-fluorocytidine
  modified_base (19)..(19): cm
  modified_base (20)..(20): 2'-deoxy-2'-fluoroadenosine
  modified_base (21)..(21): um
  modified_base (22)..(22): 2'-deoxy-2'-fluorocytidine
  misc_feature (22)..(23): 5'-phosphonothioate
  modified_base (23)..(23): cm
auucuauuucuuccgggccaucc

SEQ ID NO: 6539 - RNA, 23 nt, Artificial Sequence
  siRNA antisense strand against b2GPI
  modified_base (1)..(1): 2'-deoxy-2'-fluorocytidine
  modified_base (2)..(2): 2'-O-methyladenosine
  misc_feature (2)..(3): 5'-phosphonothioate
  modified_base (3)..(3): 2'-deoxy-2'-fluorouridine
  modified_base (4)..(4): um
  modified_base (5)..(5): 2'-deoxy-2'-fluorocytidine
  modified_base (6)..(6): um
  modified_base (7)..(7): 2'-deoxy-2'-fluoroadenosine
  modified_base (8)..(8): um
  modified_base (9)..(9): 2'-deoxy-2'-fluorouridine
  modified_base (10)..(10): um
  modified_base (11)..(11): cm
  modified_base (12)..(12): 2'-deoxy-2'-fluorouridine
  modified_base (13)..(13): um
  modified_base (14)..(14): 2'-deoxy-2'-fluorocytidine
  modified_base (15)..(15): cm
  modified_base (16)..(16): 2'-deoxy-2'-fluoroguanosine
  modified_base (17)..(17): gm
  modified_base (18)..(18): 2'-deoxy-2'-fluoroguanosine
  modified_base (19)..(19): cm
  modified_base (20)..(20): 2'-deoxy-2'-fluorocytidine
  modified_base (21)..(21): 2'-O-methyladenosine
  modified_base (22)..(22): 2'-deoxy-2'-fluorouridine
  misc_feature (22)..(23): 5'-phosphonothioate
  modified_base (23)..(23): cm
cauucuauuucuuccgggccauc

SEQ ID NO: 6540 - RNA, 23 nt, Artificial Sequence
  siRNA antisense strand against b2GPI
  modified_base (1)..(1): 2'-deoxy-2'-fluoroadenosine
  modified_base (2)..(2): cm
  misc_feature (2)..(3): 5'-phosphonothioate
  modified_base (3)..(3): 2'-deoxy-2'-fluoroadenosine
  modified_base (4)..(4): um
  modified_base (5)..(5): 2'-deoxy-2'-fluorouridine
  modified_base (6)..(6): cm
  modified_base (7)..(7): 2'-deoxy-2'-fluorouridine
  modified_base (8)..(8): 2'-O-methyladenosine
  modified_base (9)..(9): 2'-deoxy-2'-fluorouridine
  modified_base (10)..(10): um
  modified_base (11)..(11): um
  modified_base (12)..(12): 2'-deoxy-2'-fluorocytidine
  modified_base (13)..(13): um
  modified_base (14)..(14): 2'-deoxy-2'-fluorouridine
  modified_base (15)..(15): cm
  modified_base (16)..(16): 2'-deoxy-2'-fluorocytidine
  modified_base (17)..(17): gm
  modified_base (18)..(18): 2'-deoxy-2'-fluoroguanosine
  modified_base (19)..(19): gm
  modified_base (20)..(20): 2'-deoxy-2'-fluorocytidine
  modified_base (21)..(21): cm
  modified_base (22)..(22): 2'-deoxy-2'-fluoroadenosine
  misc_feature (22)..(23): 5'-phosphonothioate
  modified_base (23)..(23): um
acauucuauuucuuccgggccau

SEQ ID NO: 6541 - RNA, 23 nt, Artificial Sequence
  siRNA antisense strand against b2GPI
  modified_base (1)..(1): 2'-deoxy-2'-fluoroguanosine
  modified_base (2)..(2): um
  misc_feature (2)..(3): 5'-phosphonothioate
  modified_base (3)..(3): 2'-deoxy-2'-fluoroadenosine
  modified_base (4)..(4): cm
  modified_base (5)..(5): 2'-deoxy-2'-fluoroadenosine
  modified_base (6)..(6): um
  modified_base (7)..(7): 2'-deoxy-2'-fluorouridine
  modified_base (8)..(8): cm
  modified_base (9)..(9): 2'-deoxy-2'-fluorouridine
  modified_base (10)..(10): 2'-O-methyladenosine
  modified_base (11)..(11): um
  modified_base (12)..(12): 2'-deoxy-2'-fluorouridine
  modified_base (13)..(13): um
  modified_base (14)..(14): 2'-deoxy-2'-fluorocytidine
  modified_base (15)..(15): um
  modified_base (16)..(16): 2'-deoxy-2'-fluorouridine
  modified_base (17)..(17): cm
  modified_base (18)..(18): 2'-deoxy-2'-fluorocytidine
  modified_base (19)..(19): gm
  modified_base (20)..(20): 2'-deoxy-2'-fluoroguanosine
  modified_base (21)..(21): gm
  modified_base (22)..(22): 2'-deoxy-2'-fluorocytidine
  misc_feature (22)..(23): 5'-phosphonothioate
  modified_base (23)..(23): cm
guacauucuauuucuuccgggcc

SEQ ID NO: 6542 - RNA, 23 nt, Artificial Sequence
  siRNA antisense strand against b2GPI
  modified_base (1)..(1): 2'-deoxy-2'-fluoroguanosine
  modified_base (2)..(2): gm
  misc_feature (2)..(3): 5'-phosphonothioate
  modified_base (3)..(3): 2'-deoxy-2'-fluorouridine
  modified_base (4)..(4): 2'-O-methyladenosine
  modified_base (5)..(5): 2'-deoxy-2'-fluorocytidine
  modified_base (6)..(6): 2'-O-methyladenosine
  modified_base (7)..(7): 2'-deoxy-2'-fluorouridine
  modified_base (8)..(8): um
  modified_base (9)..(9): 2'-deoxy-2'-fluorocytidine
  modified_base (10)..(10): um
  modified_base (11)..(11): 2'-O-methyladenosine
  modified_base (12)..(12): 2'-deoxy-2'-fluorouridine
  modified_base (13)..(13): um
  modified_base (14)..(14): 2'-deoxy-2'-fluorouridine
  modified_base (15)..(15): cm
  modified_base (16)..(16): 2'-deoxy-2'-fluorouridine
  modified_base (17)..(17): um
  modified_base (18)..(18): 2'-deoxy-2'-fluorocytidine
  modified_base (19)..(19): cm
  modified_base (20)..(20): 2'-deoxy-2'-fluoroguanosine
  modified_base (21)..(21): gm
  modified_base (22)..(22): 2'-deoxy-2'-fluoroguanosine
  misc_feature (22)..(23): 5'-phosphonothioate
  modified_base (23)..(23): cm
gguacauucuauuucuuccgggc

SEQ ID NO: 6543 - RNA, 23 nt, Artificial Sequence
  siRNA antisense strand against b2GPI
  modified_base (1)..(1): 2'-deoxy-2'-fluorouridine
  modified_base (2)..(2): gm
  misc_feature (2)..(3): 5'-phosphonothioate
  modified_base (3)..(3): 2'-deoxy-2'-fluoroguanosine
  modified_base (4)..(4): um
  modified_base (5)..(5): 2'-deoxy-2'-fluoroadenosine
  modified_base (6)..(6): cm
  modified_base (7)..(7): 2'-deoxy-2'-fluoroadenosine
  modified_base (8)..(8): um
  modified_base (9)..(9): 2'-deoxy-2'-fluorouridine
  modified_base (10)..(10): cm
  modified_base (11)..(11): um
  modified_base (12)..(12): 2'-deoxy-2'-fluoroadenosine
  modified_base (13)..(13): um
  modified_base (14)..(14): 2'-deoxy-2'-fluorouridine
  modified_base (15)..(15): um
  modified_base (16)..(16): 2'-deoxy-2'-fluorocytidine
  modified_base (17)..(17): um
  modified_base (18)..(18): 2'-deoxy-2'-fluorouridine
  modified_base (19)..(19): cm
  modified_base (20)..(20): 2'-deoxy-2'-fluorocytidine
  modified_base (21)..(21): gm
  modified_base (22)..(22): 2'-deoxy-2'-fluoroguanosine
  misc_feature (22)..(23): 5'-phosphonothioate
  modified_base (23)..(23): gm
ugguacauucuauuucuuccggg

SEQ ID NO: 6544 - RNA, 23 nt, Artificial Sequence
  siRNA antisense strand against b2GPI
  modified_base (1)..(1): 2'-deoxy-2'-fluoroguanosine
  modified_base (2)..(2): um
  misc_feature (2)..(3): 5'-phosphonothioate
  modified_base (3)..(3): 2'-deoxy-2'-fluorouridine
  modified_base (4)..(4): um
  modified_base (5)..(5): 2'-deoxy-2'-fluoroguanosine
  modified_base (6)..(6): gm
  modified_base (7)..(7): 2'-deoxy-2'-fluorouridine
  modified_base (8)..(8): 2'-O-methyladenosine
  modified_base (9)..(9): 2'-deoxy-2'-fluorocytidine
  modified_base (10)..(10): 2'-O-methyladenosine
  modified_base (11)..(11): um
  modified_base (12)..(12): 2'-deoxy-2'-fluorouridine
  modified_base (13)..(13): cm
  modified_base (14)..(14): 2'-deoxy-2'-fluorouridine
  modified_base (15)..(15): 2'-O-methyladenosine
  modified_base (16)..(16): 2'-deoxy-2'-fluorouridine
  modified_base (17)..(17): um
  modified_base (18)..(18): 2'-deoxy-2'-fluorouridine
  modified_base (19)..(19): cm
  modified_base (20)..(20): 2'-deoxy-2'-fluorouridine
  modified_base (21)..(21): um
  modified_base (22)..(22): 2'-deoxy-2'-fluorocytidine
  misc_feature (22)..(23): 5'-phosphonothioate
  modified_base (23)..(23): cm
guuugguacauucuauuucuucc

SEQ ID NO: 6545 - RNA, 23 nt, Artificial Sequence
  siRNA antisense strand against b2GPI
  modified_base (1)..(1): 2'-deoxy-2'-fluorouridine
  modified_base (2)..(2): cm
  misc_feature (2)..(3): 5'-phosphonothioate
  modified_base (3)..(3): 2'-deoxy-2'-fluorocytidine
  modified_base (4)..(4): cm
  modified_base (5)..(5): 2'-deoxy-2'-fluoroadenosine
  modified_base (6)..(6): gm
  modified_base (7)..(7): 2'-deoxy-2'-fluorouridine
  modified_base (8)..(8): um
  modified_base (9)..(9): 2'-deoxy-2'-fluorouridine
  modified_base (10)..(10): gm
  modified_base (11)..(11): gm
  modified_base (12)..(12): 2'-deoxy-2'-fluorouridine
  modified_base (13)..(13): 2'-O-methyladenosine
  modified_base (14)..(14): 2'-deoxy-2'-fluorocytidine
  modified_base (15)..(15): 2'-O-methyladenosine
  modified_base (16)..(16): 2'-deoxy-2'-fluorouridine
  modified_base (17)..(17): um
  modified_base (18)..(18): 2'-deoxy-2'-fluorocytidine
  modified_base (19)..(19): um
  modified_base (20)..(20): 2'-deoxy-2'-fluoroadenosine
  modified_base (21)..(21): um
  modified_base (22)..(22): 2'-deoxy-2'-fluorouridine
  misc_feature (22)..(23): 5'-phosphonothioate
  modified_base (23)..(23): um
ucccaguuugguacauucuauuu

SEQ ID NO: 6546 - RNA, 23 nt, Artificial Sequence
  siRNA antisense strand against b2GPI
  modified_base (1)..(1): 2'-deoxy-2'-fluorouridine
  modified_base (2)..(2): um
  misc_feature (2)..(3): 5'-phosphonothioate
  modified_base (3)..(3): 2'-deoxy-2'-fluorocytidine
  modified_base (4)..(4): cm
  modified_base (5)..(5): 2'-deoxy-2'-fluorocytidine
  modified_base (6)..(6): 2'-O-methyladenosine
  modified_base (7)..(7): 2'-deoxy-2'-fluoroguanosine
  modified_base (8)..(8): um
  modified_base (9)..(9): 2'-deoxy-2'-fluorouridine
  modified_base (10)..(10): um
  modified_base (11)..(11): gm
  modified_base (12)..(12): 2'-deoxy-2'-fluoroguanosine
  modified_base (13)..(13): um
  modified_base (14)..(14): 2'-deoxy-2'-fluoroadenosine
  modified_base (15)..(15): cm
  modified_base (16)..(16): 2'-deoxy-2'-fluoroadenosine
  modified_base (17)..(17): um
  modified_base (18)..(18): 2'-deoxy-2'-fluorouridine
  modified_base (19)..(19): cm
  modified_base (20)..(20): 2'-deoxy-2'-fluorouridine
  modified_base (21)..(21): 2'-O-methyladenosine
  modified_base (22)..(22): 2'-deoxy-2'-fluorouridine
  misc_feature (22)..(23): 5'-phosphonothioate
  modified_base (23)..(23): um
uucccaguuugguacauucuauu

SEQ ID NO: 6547 - RNA, 23 nt, Artificial Sequence
  siRNA antisense strand against b2GPI
  modified_base (1)..(1): 2'-deoxy-2'-fluorouridine
  modified_base (2)..(2): um
  misc_feature (2)..(3): 5'-phosphonothioate
  modified_base (3)..(3): 2'-deoxy-2'-fluorouridine
  modified_base (4)..(4): cm
  modified_base (5)..(5): 2'-deoxy-2'-fluorocytidine
  modified_base (6)..(6): cm
  modified_base (7)..(7): 2'-deoxy-2'-fluoroadenosine
  modified_base (8)..(8): gm
  modified_base (9)..(9): 2'-deoxy-2'-fluorouridine
  modified_base (10)..(10): um
  modified_base (11)..(11): um
  modified_base (12)..(12): 2'-deoxy-2'-fluoroguanosine
  modified_base (13)..(13): gm
  modified_base (14)..(14): 2'-deoxy-2'-fluorouridine
  modified_base (15)..(15): 2'-O-methyladenosine
  modified_base (16)..(16): 2'-deoxy-2'-fluorocytidine
  modified_base (17)..(17): 2'-O-methyladenosine
  modified_base (18)..(18): 2'-deoxy-2'-fluorouridine
  modified_base (19)..(19): um
  modified_base (20)..(20): 2'-deoxy-2'-fluorocytidine
  modified_base (21)..(21): um
  modified_base (22)..(22): 2'-deoxy-2'-fluoroadenosine
  misc_feature (22)..(23): 5'-phosphonothioate
  modified_base (23)..(23): um
uuucccaguuugguacauucuau

SEQ ID NO: 6548 - RNA, 23 nt, Artificial Sequence
  siRNA antisense strand against b2GPI
  modified_base (1)..(1): 2'-deoxy-2'-fluorocytidine
  modified_base (2)..(2): 2'-O-methyladenosine
  misc_feature (2)..(3): 5'-phosphonothioate
  modified_base (3)..(3): 2'-deoxy-2'-fluoroguanosine
  modified_base (4)..(4): um
  modified_base (5)..(5): 2'-deoxy-2'-fluorouridine
  modified_base (6)..(6): um
  modified_base (7)..(7): 2'-deoxy-2'-fluorocytidine
  modified_base (8)..(8): cm
  modified_base (9)..(9): 2'-deoxy-2'-fluorocytidine
  modified_base (10)..(10): 2'-O-methyladenosine
  modified_base (11)..(11): gm
  modified_base (12)..(12): 2'-deoxy-2'-fluorouridine
  modified_base (13)..(13): um
  modified_base (14)..(14): 2'-deoxy-2'-fluorouridine
  modified_base (15)..(15): gm
  modified_base (16)..(16): 2'-deoxy-2'-fluoroguanosine
  modified_base (17)..(17): um
  modified_base (18)..(18): 2'-deoxy-2'-fluoroadenosine
  modified_base (19)..(19): cm
  modified_base (20)..(20): 2'-deoxy-2'-fluoroadenosine
  modified_base (21)..(21): um
  modified_base (22)..(22): 2'-deoxy-2'-fluorouridine
  misc_feature (22)..(23): 5'-phosphonothioate
  modified_base (23)..(23): cm
caguuucccaguuugguacauuc

SEQ ID NO: 6549 - RNA, 23 nt, Artificial Sequence
  siRNA antisense strand against b2GPI
  modified_base (1)..(1): 2'-deoxy-2'-fluoroadenosine
  modified_base (2)..(2): gm
  misc_feature (2)..(3): 5'-phosphonothioate
  modified_base (3)..(3): 2'-deoxy-2'-fluoroadenosine
  modified_base (4)..(4): cm
  modified_base (5)..(5): 2'-deoxy-2'-fluorocytidine
  modified_base (6)..(6): 2'-O-methyladenosine
  modified_base (7)..(7): 2'-deoxy-2'-fluoroguanosine
  modified_base (8)..(8): um
  modified_base (9)..(9): 2'-deoxy-2'-fluorouridine
  modified_base (10)..(10): um
  modified_base (11)..(11): cm
  modified_base (12)..(12): 2'-deoxy-2'-fluorocytidine
  modified_base (13)..(13): cm
  modified_base (14)..(14): 2'-deoxy-2'-fluoroadenosine
  modified_base (15)..(15): gm
  modified_base (16)..(16): 2'-deoxy-2'-fluorouridine
  modified_base (17)..(17): um
  modified_base (18)..(18): 2'-deoxy-2'-fluorouridine
  modified_base (19)..(19): gm
  modified_base (20)..(20): 2'-deoxy-2'-fluoroguanosine
  modified_base (21)..(21): um
  modified_base (22)..(22): 2'-deoxy-2'-fluoroadenosine
  misc_feature (22)..(23): 5'-phosphonothioate
  modified_base (23)..(23): cm
agaccaguuucccaguuugguac

SEQ ID NO: 6550 - RNA, 23 nt, Artificial Sequence
  siRNA antisense strand against b2GPI
  modified_base (1)..(1): 2'-deoxy-2'-fluorocytidine
  modified_base (2)..(2): 2'-O-methyladenosine
  misc_feature (2)..(3): 5'-phosphonothioate
  modified_base (3)..(3): 2'-deoxy-2'-fluoroguanosine
  modified_base (4)..(4): 2'-O-methyladenosine
  modified_base (5)..(5): 2'-deoxy-2'-fluorocytidine
  modified_base (6)..(6): cm
  modified_base (7)..(7): 2'-deoxy-2'-fluoroadenosine
  modified_base (8)..(8): gm
  modified_base (9)..(9): 2'-deoxy-2'-fluorouridine
  modified_base (10)..(10): um
  modified_base (11)..(11): um
  modified_base (12)..(12): 2'-deoxy-2'-fluorocytidine
  modified_base (13)..(13): cm
  modified_base (14)..(14): 2'-deoxy-2'-fluorocytidine
  modified_base (15)..(15): 2'-O-methyladenosine
  modified_base (16)..(16): 2'-deoxy-2'-fluoroguanosine
  modified_base (17)..(17): um
  modified_base (18)..(18): 2'-deoxy-2'-fluorouridine
  modified_base (19)..(19): um
  modified_base (20)..(20): 2'-deoxy-2'-fluoroguanosine
  modified_base (21)..(21): gm
  modified_base (22)..(22): 2'-deoxy-2'-fluorouridine
  misc_feature (22)..(23): 5'-phosphonothioate
  modified_base (23)..(23): 2'-O-methyladenosine
cagaccaguuucccaguuuggua

SEQ ID NO: 6551 - RNA, 23 nt, Artificial Sequence
  siRNA antisense strand against b2GPI
  modified_base (1)..(1): 2'-deoxy-2'-fluorouridine
  modified_base (2)..(2): gm
  misc_feature (2)..(3): 5'-phosphonothioate
  modified_base (3)..(3): 2'-deoxy-2'-fluoroguanosine
  modified_base (4)..(4): cm
  modified_base (5)..(5): 2'-deoxy-2'-fluoroadenosine
  modified_base (6)..(6): gm
  modified_base (7)..(7): 2'-deoxy-2'-fluoroadenosine
  modified_base (8)..(8): cm
  modified_base (9)..(9): 2'-deoxy-2'-fluorocytidine
  modified_base (10)..(10): 2'-O-methyladenosine
  modified_base (11)..(11): gm
  modified_base (12)..(12): 2'-deoxy-2'-fluorouridine
  modified_base (13)..(13): um
  modified_base (14)..(14): 2'-deoxy-2'-fluorouridine
  modified_base (15)..(15): cm
  modified_base (16)..(16): 2'-deoxy-2'-fluorocytidine
  modified_base (17)..(17): cm
  modified_base (18)..(18): 2'-deoxy-2'-fluoroadenosine
  modified_base (19)..(19): gm
  modified_base (20)..(20): 2'-deoxy-2'-fluorouridine
  modified_base (21)..(21): um
  modified_base (22)..(22): 2'-deoxy-2'-fluorouridine
  misc_feature (22)..(23): 5'-phosphonothioate
  modified_base (23)..(23): gm
uggcagaccaguuucccaguuug

SEQ ID NO: 6552 - RNA, 23 nt, Artificial Sequence
  siRNA antisense strand against b2GPI
  modified_base (1)..(1): 2'-deoxy-2'-fluoroadenosine
  modified_base (2)..(2): um
  misc_feature (2)..(3): 5'-phosphonothioate
  modified_base (3)..(3): 2'-deoxy-2'-fluoroguanosine
  modified_base (4)..(4): gm
  modified_base (5)..(5): 2'-deoxy-2'-fluorocytidine
  modified_base (6)..(6): 2'-O-methyladenosine
  modified_base (7)..(7): 2'-deoxy-2'-fluoroguanosine
  modified_base (8)..(8): 2'-O-methyladenosine
  modified_base (9)..(9): 2'-deoxy-2'-fluorocytidine
  modified_base (10)..(10): cm
  modified_base (11)..(11): 2'-O-methyladenosine
  modified_base (12)..(12): 2'-deoxy-2'-fluoroguanosine
  modified_base (13)..(13): um
  modified_base (14)..(14): 2'-deoxy-2'-fluorouridine
  modified_base (15)..(15): um
  modified_base (16)..(16): 2'-deoxy-2'-fluorocytidine
  modified_base (17)..(17): cm
  modified_base (18)..(18): 2'-deoxy-2'-fluorocytidine
  modified_base (19)..(19): 2'-O-methyladenosine
  modified_base (20)..(20): 2'-deoxy-2'-fluoroguanosine
  modified_base (21)..(21): um
  modified_base (22)..(22): 2'-deoxy-2'-fluorouridine
  misc_feature (22)..(23): 5'-phosphonothioate
  modified_base (23)..(23): um
auggcagaccaguuucccaguuu

SEQ ID NO: 6553 - RNA, 23 nt, Artificial Sequence
  siRNA antisense strand against b2GPI
  modified_base (1)..(1): 2'-deoxy-2'-fluorocytidine
  modified_base (2)..(2): 2'-O-methyladenosine
  misc_feature (2)..(3): 5'-phosphonothioate
  modified_base (3)..(3): 2'-deoxy-2'-fluorouridine
  modified_base (4)..(4): gm
  modified_base (5)..(5): 2'-deoxy-2'-fluoroguanosine
  modified_base (6)..(6): cm
  modified_base (7)..(7): 2'-deoxy-2'-fluoroadenosine
  modified_base (8)..(8): gm
  modified_base (9)..(9): 2'-deoxy-2'-fluoroadenosine
  modified_base (10)..(10): cm
  modified_base (11)..(11): cm
  modified_base (12)..(12): 2'-deoxy-2'-fluoroadenosine
  modified_base (13)..(13): gm
  modified_base (14)..(14): 2'-deoxy-2'-fluorouridine
  modified_base (15)..(15): um
  modified_base (16)..(16): 2'-deoxy-2'-fluorouridine
  modified_base (17)..(17): cm
  modified_base (18)..(18): 2'-deoxy-2'-fluorocytidine
  modified_base (19)..(19): cm
  modified_base (20)..(20): 2'-deoxy-2'-fluoroadenosine
  modified_base (21)..(21): gm
  modified_base (22)..(22): 2'-deoxy-2'-fluorouridine
  misc_feature (22)..(23): 5'-phosphonothioate
  modified_base (23)..(23): um
cauggcagaccaguuucccaguu

SEQ ID NO: 6554 - RNA, 23 nt, Artificial Sequence
  siRNA antisense strand against b2GPI
  modified_base (1)..(1): 2'-deoxy-2'-fluoroguanosine
  modified_base (2)..(2): cm
  misc_feature (2)..(3): 5'-phosphonothioate
  modified_base (3)..(3): 2'-deoxy-2'-fluoroadenosine
  modified_base (4)..(4): um
  modified_base (5)..(5): 2'-deoxy-2'-fluoroguanosine
  modified_base (6)..(6): gm
  modified_base (7)..(7): 2'-deoxy-2'-fluorocytidine
  modified_base (8)..(8): 2'-O-methyladenosine
  modified_base (9)..(9): 2'-deoxy-2'-fluoroguanosine
  modified_base (10)..(10): 2'-O-methyladenosine
  modified_base (11)..(11): cm
  modified_base (12)..(12): 2'-deoxy-2'-fluorocytidine
  modified_base (13)..(13): 2'-O-methyladenosine
  modified_base (14)..(14): 2'-deoxy-2'-fluoroguanosine
  modified_base (15)..(15): um
  modified_base (16)..(16): 2'-deoxy-2'-fluorouridine
  modified_base (17)..(17): um
  modified_base (18)..(18): 2'-deoxy-2'-fluorocytidine
  modified_base (19)..(19): cm
  modified_base (20)..(20): 2'-deoxy-2'-fluorocytidine
  modified_base (21)..(21): 2'-O-methyladenosine
  modified_base (22)..(22): 2'-deoxy-2'-fluoroguanosine
  misc_feature (22)..(23): 5'-phosphonothioate
  modified_base (23)..(23): um
gcauggcagaccaguuucccagu

SEQ ID NO: 6555 - RNA, 23 nt, Artificial Sequence
  siRNA antisense strand against b2GPI
  modified_base (1)..(1): 2'-deoxy-2'-fluorouridine
  modified_base (2)..(2): gm
  misc_feature (2)..(3): 5'-phosphonothioate
  modified_base (3)..(3): 2'-deoxy-2'-fluoroguanosine
  modified_base (4)..(4): cm
  modified_base (5)..(5): 2'-deoxy-2'-fluoroadenosine
  modified_base (6)..(6): um
  modified_base (7)..(7): 2'-deoxy-2'-fluoroguanosine
  modified_base (8)..(8): gm
  modified_base (9)..(9): 2'-deoxy-2'-fluorocytidine
  modified_base (10)..(10): 2'-O-methyladenosine
  modified_base (11)..(11): gm
  modified_base (12)..(12): 2'-deoxy-2'-fluoroadenosine
  modified_base (13)..(13): cm
  modified_base (14)..(14): 2'-deoxy-2'-fluorocytidine
  modified_base (15)..(15): 2'-O-methyladenosine
  modified_base (16)..(16): 2'-deoxy-2'-fluoroguanosine
  modified_base (17)..(17): um
  modified_base (18)..(18): 2'-deoxy-2'-fluorouridine
  modified_base (19)..(19): um
  modified_base (20)..(20): 2'-deoxy-2'-fluorocytidine
  modified_base (21)..(21): cm
  modified_base (22)..(22): 2'-deoxy-2'-fluorocytidine
  misc_feature (22)..(23): 5'-phosphonothioate
  modified_base (23)..(23): 2'-O-methyladenosine
uggcauggcagaccaguuuccca

SEQ ID NO: 6556 - RNA, 23 nt, Artificial Sequence
  siRNA antisense strand against b2GPI
  modified_base (1)..(1): 2'-deoxy-2'-fluorouridine
  modified_base (2)..(2): um
  misc_feature (2)..(3): 5'-phosphonothioate
  modified_base (3)..(3): 2'-deoxy-2'-fluoroguanosine
  modified_base (4)..(4): gm
  modified_base (5)..(5): 2'-deoxy-2'-fluorocytidine
  modified_base (6)..(6): 2'-O-methyladenosine
  modified_base (7)..(7): 2'-deoxy-2'-fluorouridine
  modified_base (8)..(8): gm
  modified_base (9)..(9): 2'-deoxy-2'-fluoroguanosine
  modified_base (10)..(10): cm
  modified_base (11)..(11): 2'-O-methyladenosine
  modified_base (12)..(12): 2'-deoxy-2'-fluoroguanosine
  modified_base (13)..(13): 2'-O-methyladenosine
  modified_base (14)..(14): 2'-deoxy-2'-fluorocytidine
  modified_base (15)..(15): cm
  modified_base (16)..(16): 2'-deoxy-2'-fluoroadenosine
  modified_base (17)..(17): gm
  modified_base (18)..(18): 2'-deoxy-2'-fluorouridine
  modified_base (19)..(19): um
  modified_base (20)..(20): 2'-deoxy-2'-fluorouridine
  modified_base (21)..(21): cm
  modified_base (22)..(22): 2'-deoxy-2'-fluorocytidine
  misc_feature (22)..(23): 5'-phosphonothioate
  modified_base (23)..(23): cm
uuggcauggcagaccaguuuccc

SEQ ID NO: 6557 - RNA, 23 nt, Artificial Sequence
  siRNA antisense strand against b2GPI
  modified_base (1)..(1): 2'-deoxy-2'-fluorocytidine
  modified_base (2)..(2): um
  misc_feature (2)..(3): 5'-phosphonothioate
  modified_base (3)..(3): 2'-deoxy-2'-fluorouridine
  modified_base (4)..(4): gm
  modified_base (5)..(5): 2'-deoxy-2'-fluoroguanosine
  modified_base (6)..(6): cm
  modified_base (7)..(7): 2'-deoxy-2'-fluoroadenosine
  modified_base (8)..(8): um
  modified_base (9)..(9): 2'-deoxy-2'-fluoroguanosine
  modified_base (10)..(10): gm
  modified_base (11)..(11): cm
  modified_base (12)..(12): 2'-deoxy-2'-fluoroadenosine
  modified_base (13)..(13): gm
  modified_base (14)..(14): 2'-deoxy-2'-fluoroadenosine
  modified_base (15)..(15): cm
  modified_base (16)..(16): 2'-deoxy-2'-fluorocytidine
  modified_base (17)..(17): 2'-O-methyladenosine
  modified_base (18)..(18): 2'-deoxy-2'-fluoroguanosine
  modified_base (19)..(19): um
  modified_base (20)..(20): 2'-deoxy-2'-fluorouridine
  modified_base (21)..(21): um
  modified_base (22)..(22): 2'-deoxy-2'-fluorocytidine
  misc_feature (22)..(23): 5'-phosphonothioate
  modified_base (23)..(23): cm
cuuggcauggcagaccaguuucc

SEQ ID NO: 6558 - RNA, 23 nt, Artificial Sequence
  siRNA antisense strand against b2GPI
  modified_base (1)..(1): 2'-deoxy-2'-fluoroadenosine
  modified_base (2)..(2): cm
  misc_feature (2)..(3): 5'-phosphonothioate
  modified_base (3)..(3): 2'-deoxy-2'-fluorouridine
  modified_base (4)..(4): um
  modified_base (5)..(5): 2'-deoxy-2'-fluoroguanosine
  modified_base (6)..(6): gm
  modified_base (7)..(7): 2'-deoxy-2'-fluorocytidine
  modified_base (8)..(8): 2'-O-methyladenosine
  modified_base (9)..(9): 2'-deoxy-2'-fluorouridine
  modified_base (10)..(10): gm
  modified_base (11)..(11): gm
  modified_base (12)..(12): 2'-deoxy-2'-fluorocytidine
  modified_base (13)..(13): 2'-O-methyladenosine
  modified_base (14)..(14): 2'-deoxy-2'-fluoroguanosine
  modified_base (15)..(15): 2'-O-methyladenosine
  modified_base (16)..(16): 2'-deoxy-2'-fluorocytidine
  modified_base (17)..(17): cm
  modified_base (18)..(18): 2'-deoxy-2'-fluoroadenosine
  modified_base (19)..(19): gm
  modified_base (20)..(20): 2'-deoxy-2'-fluorouridine
  modified_base (21)..(21): um
  modified_base (22)..(22): 2'-deoxy-2'-fluorouridine
  misc_feature (22)..(23): 5'-phosphonothioate
  modified_base (23)..(23): cm
acuuggcauggcagaccaguuuc

SEQ ID NO: 6559 - RNA, 23 nt, Artificial Sequence
  siRNA antisense strand against b2GPI
  modified_base (1)..(1): 2'-deoxy-2'-fluoroadenosine
  modified_base (2)..(2): 2'-O-methyladenosine
  misc_feature (2)..(3): 5'-phosphonothioate
  modified_base (3)..(3): 2'-deoxy-2'-fluorocytidine
  modified_base (4)..(4): um
  modified_base (5)..(5): 2'-deoxy-2'-fluorouridine
  modified_base (6)..(6): gm
  modified_base (7)..(7): 2'-deoxy-2'-fluoroguanosine
  modified_base (8)..(8): cm
  modified_base (9)..(9): 2'-deoxy-2'-fluoroadenosine
  modified_base (10)..(10): um
  modified_base (11)..(11): gm
  modified_base (12)..(12): 2'-deoxy-2'-fluoroguanosine
  modified_base (13)..(13): cm
  modified_base (14)..(14): 2'-deoxy-2'-fluoroadenosine
  modified_base (15)..(15): gm
  modified_base (16)..(16): 2'-deoxy-2'-fluoroadenosine
  modified_base (17)..(17): cm
  modified_base (18)..(18): 2'-deoxy-2'-fluorocytidine
  modified_base (19)..(19): 2'-O-methyladenosine
  modified_base (20)..(20): 2'-deoxy-2'-fluoroguanosine
  modified_base (21)..(21): um
  modified_base (22)..(22): 2'-deoxy-2'-fluorouridine
  misc_feature (22)..(23): 5'-phosphonothioate
  modified_base (23)..(23): um
aacuuggcauggcagaccaguuu

SEQ ID NO: 6560 - RNA, 23 nt, Artificial Sequence
  siRNA antisense strand against b2GPI
  modified_base (1)..(1): 2'-deoxy-2'-fluorocytidine
  modified_base (2)..(2): 2'-O-methyladenosine
  misc_feature (2)..(3): 5'-phosphonothioate
  modified_base (3)..(3): 2'-deoxy-2'-fluoroadenosine
  modified_base (4)..(4): cm
  modified_base (5)..(5): 2'-deoxy-2'-fluorouridine
  modified_base (6)..(6): um
  modified_base (7)..(7): 2'-deoxy-2'-fluoroguanosine
  modified_base (8)..(8): gm
  modified_base (9)..(9): 2'-deoxy-2'-fluorocytidine
  modified_base (10)..(10): 2'-O-methyladenosine
  modified_base (11)..(11): um
  modified_base (12)..(12): 2'-deoxy-2'-fluoroguanosine
  modified_base (13)..(13): gm
  modified_base (14)..(14): 2'-deoxy-2'-fluorocytidine
  modified_base (15)..(15): 2'-O-methyladenosine
  modified_base (16)..(16): 2'-deoxy-2'-fluoroguanosine
  modified_base (17)..(17): 2'-O-methyladenosine
  modified_base (18)..(18): 2'-deoxy-2'-fluorocytidine
  modified_base (19)..(19): cm
  modified_base (20)..(20): 2'-deoxy-2'-fluoroadenosine
  modified_base (21)..(21): gm
  modified_base (22)..(22): 2'-deoxy-2'-fluorouridine
  misc_feature (22)..(23): 5'-phosphonothioate
  modified_base (23)..(23): um
caacuuggcauggcagaccaguu

SEQ ID NO: 6561 - RNA, 23 nt, Artificial Sequence
  siRNA antisense strand against b2GPI
  modified_base (1)..(1): 2'-deoxy-2'-fluoroadenosine
  modified_base (2)..(2): cm
  misc_feature (2)..(3): 5'-phosphonothioate
  modified_base (3)..(3): 2'-deoxy-2'-fluoroadenosine
  modified_base (4)..(4): 2'-O-methyladenosine
  modified_base (5)..(5): 2'-deoxy-2'-fluorocytidine
  modified_base (6)..(6): um
  modified_base (7)..(7): 2'-deoxy-2'-fluorouridine
  modified_base (8)..(8): gm
  modified_base (9)..(9): 2'-deoxy-2'-fluoroguanosine
  modified_base (10)..(10): cm
  modified_base (11)..(11): 2'-O-methyladenosine
  modified_base (12)..(12): 2'-deoxy-2'-fluorouridine
  modified_base (13)..(13): gm
  modified_base (14)..(14): 2'-deoxy-2'-fluoroguanosine
  modified_base (15)..(15): cm
  modified_base (16)..(16): 2'-deoxy-2'-fluoroadenosine
  modified_base (17)..(17): gm
  modified_base (18)..(18): 2'-deoxy-2'-fluoroadenosine
  modified_base (19)..(19): cm
  modified_base (20)..(20): 2'-deoxy-2'-fluorocytidine
  modified_base (21)..(21): 2'-O-methyladenosine
  modified_base (22)..(22): 2'-deoxy-2'-fluoroguanosine
  misc_feature (22)..(23): 5'-phosphonothioate
  modified_base (23)..(23): um
acaacuuggcauggcagaccagu

SEQ ID NO: 6562 - RNA, 23 nt, Artificial Sequence
  siRNA antisense strand against b2GPI
  modified_base (1)..(1): 2'-deoxy-2'-fluorouridine
  modified_base (2)..(2): 2'-O-methyladenosine
  misc_feature (2)..(3): 5'-phosphonothioate
  modified_base (3)..(3): 2'-deoxy-2'-fluorocytidine
  modified_base (4)..(4): 2'-O-methyladenosine
  modified_base (5)..(5): 2'-deoxy-2'-fluoroadenosine
  modified_base (6)..(6): cm
  modified_base (7)..(7): 2'-deoxy-2'-fluorouridine
  modified_base (8)..(8): um
  modified_base (9)..(9): 2'-deoxy-2'-fluoroguanosine
  modified_base (10)..(10): gm
  modified_base (11)..(11): cm
  modified_base (12)..(12): 2'-deoxy-2'-fluoroadenosine
  modified_base (13)..(13): um
  modified_base (14)..(14): 2'-deoxy-2'-fluoroguanosine
  modified_base (15)..(15): gm
  modified_base (16)..(16): 2'-deoxy-2'-fluorocytidine
  modified_base (17)..(17): 2'-O-methyladenosine
  modified_base (18)..(18): 2'-deoxy-2'-fluoroguanosine
  modified_base (19)..(19): 2'-O-methyladenosine
  modified_base (20)..(20): 2'-deoxy-2'-fluorocytidine
  modified_base (21)..(21): cm
  modified_base (22)..(22): 2'-deoxy-2'-fluoroadenosine
  misc_feature (22)..(23): 5'-phosphonothioate
  modified_base (23)..(23): gm
uacaacuuggcauggcagaccag

SEQ ID NO: 6563 - RNA, 23 nt, Artificial Sequence
  siRNA antisense strand against b2GPI
  modified_base (1)..(1): 2'-deoxy-2'-fluorouridine
  modified_base (2)..(2): um
  misc_feature (2)..(3): 5'-phosphonothioate
  modified_base (3)..(3): 2'-deoxy-2'-fluoroadenosine
  modified_base (4)..(4): cm
  modified_base (5)..(5): 2'-deoxy-2'-fluoroadenosine
  modified_base (6)..(6): 2'-O-methyladenosine
  modified_base (7)..(7): 2'-deoxy-2'-fluorocytidine
  modified_base (8)..(8): um
  modified_base (9)..(9): 2'-deoxy-2'-fluorouridine
  modified_base (10)..(10): gm
  modified_base (11)..(11): gm
  modified_base (12)..(12): 2'-deoxy-2'-fluorocytidine
  modified_base (13)..(13): 2'-O-methyladenosine
  modified_base (14)..(14): 2'-deoxy-2'-fluorouridine
  modified_base (15)..(15): gm
  modified_base (16)..(16): 2'-deoxy-2'-fluoroguanosine
  modified_base (17)..(17): cm
  modified_base (18)..(18): 2'-deoxy-2'-fluoroadenosine
  modified_base (19)..(19): gm
  modified_base (20)..(20): 2'-deoxy-2'-fluoroadenosine
  modified_base (21)..(21): cm
  modified_base (22)..(22): 2'-deoxy-2'-fluorocytidine
  misc_feature (22)..(23): 5'-phosphonothioate
  modified_base (23)..(23): 2'-O-methyladenosine
uuacaacuuggcauggcagacca

SEQ ID NO: 6564 - RNA, 23 nt, Artificial Sequence
  siRNA antisense strand against b2GPI
  modified_base (1)..(1): 2'-deoxy-2'-fluorouridine
  modified_base (2)..(2): um
  misc_feature (2)..(3): 5'-phosphonothioate
  modified_base (3)..(3): 2'-deoxy-2'-fluorouridine
  modified_base (4)..(4): 2'-O-methyladenosine
  modified_base (5)..(5): 2'-deoxy-2'-fluorocytidine
  modified_base (6)..(6): 2'-O-methyladenosine
  modified_base (7)..(7): 2'-deoxy-2'-fluoroadenosine
  modified_base (8)..(8): cm
  modified_base (9)..(9): 2'-deoxy-2'-fluorouridine
  modified_base (10)..(10): um
  modified_base (11)..(11): gm
  modified_base (12)..(12): 2'-deoxy-2'-fluoroguanosine
  modified_base (13)..(13): cm
  modified_base (14)..(14): 2'-deoxy-2'-fluoroadenosine
  modified_base (15)..(15): um
  modified_base (16)..(16): 2'-deoxy-2'-fluoroguanosine
  modified_base (17)..(17): gm
  modified_base (18)..(18): 2'-deoxy-2'-fluorocytidine
  modified_base (19)..(19): 2'-O-methyladenosine
  modified_base (20)..(20): 2'-deoxy-2'-fluoroguanosine
  modified_base (21)..(21): 2'-O-methyladenosine
  modified_base (22)..(22): 2'-deoxy-2'-fluorocytidine
  misc_feature (22)..(23): 5'-phosphonothioate
  modified_base (23)..(23): cm
uuuacaacuuggcauggcagacc

SEQ ID NO: 6565 - RNA, 23 nt, Artificial Sequence
  siRNA antisense strand against b2GPI
  modified_base (1)..(1): 2'-deoxy-2'-fluorocytidine
  modified_base (2)..(2): um
  misc_feature (2)..(3): 5'-phosphonothioate
  modified_base (3)..(3): 2'-deoxy-2'-fluorouridine
  modified_base (4)..(4): um
  modified_base (5)..(5): 2'-deoxy-2'-fluoroadenosine
  modified_base (6)..(6): cm
  modified_base (7)..(7): 2'-deoxy-2'-fluoroadenosine
  modified_base (8)..(8): 2'-O-methyladenosine
  modified_base (9)..(9): 2'-deoxy-2'-fluorocytidine
  modified_base (10)..(10): um
  modified_base (11)..(11): um
  modified_base (12)..(12): 2'-deoxy-2'-fluoroguanosine
  modified_base (13)..(13): gm
  modified_base (14)..(14): 2'-deoxy-2'-fluorocytidine
  modified_base (15)..(15): 2'-O-methyladenosine
  modified_base (16)..(16): 2'-deoxy-2'-fluorouridine
  modified_base (17)..(17): gm
  modified_base (18)..(18): 2'-deoxy-2'-fluoroguanosine
  modified_base (19)..(19): cm
  modified_base (20)..(20): 2'-deoxy-2'-fluoroadenosine
  modified_base (21)..(21): gm
  modified_base (22)..(22): 2'-deoxy-2'-fluoroadenosine
  misc_feature (22)..(23): 5'-phosphonothioate
  modified_base (23)..(23): cm
cuuuacaacuuggcauggcagac

SEQ ID NO: 6566 - RNA, 23 nt, Artificial Sequence
  siRNA antisense strand against b2GPI
  modified_base (1)..(1): 2'-deoxy-2'-fluorouridine
  modified_base (2)..(2): gm
  misc_feature (2)..(3): 5'-phosphonothioate
  modified_base (3)..(3): 2'-deoxy-2'-fluorocytidine
  modified_base (4)..(4): um
  modified_base (5)..(5): 2'-deoxy-2'-fluorouridine
  modified_base (6)..(6): um
  modified_base (7)..(7): 2'-deoxy-2'-fluoroadenosine
  modified_base (8)..(8): cm
  modified_base (9)..(9): 2'-deoxy-2'-fluoroadenosine
  modified_base (10)..(10): 2'-O-methyladenosine
  modified_base (11)..(11): cm
  modified_base (12)..(12): 2'-deoxy-2'-fluorouridine
  modified_base (13)..(13): um
  modified_base (14)..(14): 2'-deoxy-2'-fluoroguanosine
  modified_base (15)..(15): gm
  modified_base (16)..(16): 2'-deoxy-2'-fluorocytidine
  modified_base (17)..(17): 2'-O-methyladenosine
  modified_base (18)..(18): 2'-deoxy-2'-fluorouridine
  modified_base (19)..(19): gm
  modified_base (20)..(20): 2'-deoxy-2'-fluoroguanosine
  modified_base (21)..(21): cm
  modified_base (22)..(22): 2'-deoxy-2'-fluoroadenosine
  misc_feature (22)..(23): 5'-phosphonothioate
  modified_base (23)..(23): gm
ugcuuuacaacuuggcauggcag

SEQ ID NO: 6567 - RNA, 23 nt, Artificial Sequence
  siRNA antisense strand against b2GPI
  modified_base (1)..(1): 2'-deoxy-2'-fluoroadenosine
  modified_base (2)..(2): um
  misc_feature (2)..(3): 5'-phosphonothioate
  modified_base (3)..(3): 2'-deoxy-2'-fluoroguanosine
  modified_base (4)..(4): cm
  modified_base (5)..(5): 2'-deoxy-2'-fluorouridine
  modified_base (6)..(6): um
  modified_base (7)..(7): 2'-deoxy-2'-fluorouridine
  modified_base (8)..(8): 2'-O-methyladenosine
  modified_base (9)..(9): 2'-deoxy-2'-fluorocytidine
  modified_base (10)..(10): 2'-O-methyladenosine
  modified_base (11)..(11): 2'-O-methyladenosine
  modified_base (12)..(12): 2'-deoxy-2'-fluorocytidine
  modified_base (13)..(13): um
  modified_base (14)..(14): 2'-deoxy-2'-fluorouridine
  modified_base (15)..(15): gm
  modified_base (16)..(16): 2'-deoxy-2'-fluoroguanosine
  modified_base (17)..(17): cm
  modified_base (18)..(18): 2'-deoxy-2'-fluoroadenosine
  modified_base (19)..(19): um
  modified_base (20)..(20): 2'-deoxy-2'-fluoroguanosine
  modified_base (21)..(21): gm
  modified_base (22)..(22): 2'-deoxy-2'-fluorocytidine
  misc_feature (22)..(23): 5'-phosphonothioate
  modified_base (23)..(23): 2'-O-methyladenosine
augcuuuacaacuuggcauggca

SEQ ID NO: 6568 - RNA, 23 nt, Artificial Sequence
  siRNA antisense strand against b2GPI
  modified_base (1)..(1): 2'-deoxy-2'-fluoroguanosine
  modified_base (2)..(2): 2'-O-methyladenosine
  misc_feature (2)..(3): 5'-phosphonothioate
  modified_base (3)..(3): 2'-deoxy-2'-fluorouridine
  modified_base (4)..(4): gm
  modified_base (5)..(5): 2'-deoxy-2'-fluorocytidine
  modified_base (6)..(6): um
  modified_base (7)..(7): 2'-deoxy-2'-fluorouridine
  modified_base (8)..(8): um
  modified_base (9)..(9): 2'-deoxy-2'-fluoroadenosine
  modified_base (10)..(10): cm
  modified_base (11)..(11): 2'-O-methyladenosine
  modified_base (12)..(12): 2'-deoxy-2'-fluoroadenosine
  modified_base (13)..(13): cm
  modified_base (14)..(14): 2'-deoxy-2'-fluorouridine
  modified_base (15)..(15): um
  modified_base (16)..(16): 2'-deoxy-2'-fluoroguanosine
  modified_base (17)..(17): gm
  modified_base (18)..(18): 2'-deoxy-2'-fluorocytidine
  modified_base (19)..(19): 2'-O-methyladenosine
  modified_base (20)..(20): 2'-deoxy-2'-fluorouridine
  modified_base (21)..(21): gm
  modified_base (22)..(22): 2'-deoxy-2'-fluoroguanosine
  misc_feature (22)..(23): 5'-phosphonothioate
  modified_base (23)..(23): cm
gaugcuuuacaacuuggcauggc

SEQ ID NO: 6569 - RNA, 23 nt, Artificial Sequence
  siRNA antisense strand against b2GPI
  modified_base (1)..(1): 2'-deoxy-2'-fluoroadenosine
  modified_base (2)..(2): gm
  misc_feature (2)..(3): 5'-phosphonothioate
  modified_base (3)..(3): 2'-deoxy-2'-fluoroadenosine
  modified_base (4)..(4): um
  modified_base (5)..(5): 2'-deoxy-2'-fluoroguanosine
  modified_base (6)..(6): cm
  modified_base (7)..(7): 2'-deoxy-2'-fluorouridine
  modified_base (8)..(8): um
  modified_base (9)..(9): 2'-deoxy-2'-fluorouridine
  modified_base (10)..(10): 2'-O-methyladenosine
  modified_base (11)..(11): cm
  modified_base (12)..(12): 2'-deoxy-2'-fluoroadenosine
  modified_base (13)..(13): 2'-O-methyladenosine
  modified_base (14)..(14): 2'-deoxy-2'-fluorocytidine
  modified_base (15)..(15): um
  modified_base (16)..(16): 2'-deoxy-2'-fluorouridine
  modified_base (17)..(17): gm
  modified_base (18)..(18): 2'-deoxy-2'-fluoroguanosine
  modified_base (19)..(19): cm
  modified_base (20)..(20): 2'-deoxy-2'-fluoroadenosine
  modified_base (21)..(21): um
  modified_base (22)..(22): 2'-deoxy-2'-fluoroguanosine
  misc_feature (22)..(23): 5'-phosphonothioate
  modified_base (23)..(23): gm
agaugcuuuacaacuuggcaugg

SEQ ID NO: 6570 - RNA, 23 nt, Artificial Sequence
  siRNA antisense strand against b2GPI
  modified_base (1)..(1): 2'-deoxy-2'-fluoroadenosine
  modified_base (2)..(2): 2'-O-methyladenosine
  misc_feature (2)..(3): 5'-phosphonothioate
  modified_base (3)..(3): 2'-deoxy-2'-fluoroguanosine
  modified_base (4)..(4): 2'-O-methyladenosine
  modified_base (5)..(5): 2'-deoxy-2'-fluorouridine
  modified_base (6)..(6): gm
  modified_base (7)..(7): 2'-deoxy-2'-fluorocytidine
  modified_base (8)..(8): um
  modified_base (9)..(9): 2'-deoxy-2'-fluorouridine
  modified_base (10)..(10): um
  modified_base (11)..(11): 2'-O-methyladenosine
  modified_base (12)..(12): 2'-deoxy-2'-fluorocytidine
  modified_base (13)..(13): 2'-O-methyladenosine
  modified_base (14)..(14): 2'-deoxy-2'-fluoroadenosine
  modified_base (15)..(15): cm
  modified_base (16)..(16): 2'-deoxy-2'-fluorouridine
  modified_base (17)..(17): um
  modified_base (18)..(18): 2'-deoxy-2'-fluoroguanosine
  modified_base (19)..(19): gm
  modified_base (20)..(20): 2'-deoxy-2'-fluorocytidine
  modified_base (21)..(21): 2'-O-methyladenosine
  modified_base (22)..(22): 2'-deoxy-2'-fluorouridine
  misc_feature (22)..(23): 5'-phosphonothioate
  modified_base (23)..(23): gm
aagaugcuuuacaacuuggcaug

SEQ ID NO: 6571 - RNA, 23 nt, Artificial Sequence
  siRNA antisense strand against b2GPI
  modified_base (1)..(1): 2'-deoxy-2'-fluorocytidine
  modified_base (2)..(2): 2'-O-methyladenosine
  misc_feature (2)..(3): 5'-phosphonothioate
  modified_base (3)..(3): 2'-deoxy-2'-fluoroadenosine
  modified_base (4)..(4): gm
  modified_base (5)..(5): 2'-deoxy-2'-fluoroadenosine
  modified_base (6)..(6): um
  modified_base (7)..(7): 2'-deoxy-2'-fluoroguanosine
  modified_base (8)..(8): cm
  modified_base (9)..(9): 2'-deoxy-2'-fluorouridine
  modified_base (10)..(10): um
  modified_base (11)..(11): um
  modified_base (12)..(12): 2'-deoxy-2'-fluoroadenosine
  modified_base (13)..(13): cm
  modified_base (14)..(14): 2'-deoxy-2'-fluoroadenosine
  modified_base (15)..(15): 2'-O-methyladenosine
  modified_base (16)..(16): 2'-deoxy-2'-fluorocytidine
  modified_base (17)..(17): um
  modified_base (18)..(18): 2'-deoxy-2'-fluorouridine
  modified_base (19)..(19): gm
  modified_base (20)..(20): 2'-deoxy-2'-fluoroguanosine
  modified_base (21)..(21): cm
  modified_base (22)..(22): 2'-deoxy-2'-fluoroadenosine
  misc_feature (22)..(23): 5'-phosphonothioate
  modified_base (23)..(23): um
caagaugcuuuacaacuuggcau

SEQ ID NO: 6572 - RNA, 23 nt, Artificial Sequence
  siRNA antisense strand against b2GPI
  modified_base (1)..(1): 2'-deoxy-2'-fluoroadenosine
  modified_base (2)..(2): cm
  misc_feature (2)..(3): 5'-phosphonothioate
  modified_base (3)..(3): 2'-deoxy-2'-fluoroadenosine
  modified_base (4)..(4): 2'-O-methyladenosine
  modified_base (5)..(5): 2'-deoxy-2'-fluoroguanosine
  modified_base (6)..(6): 2'-O-methyladenosine
  modified_base (7)..(7): 2'-deoxy-2'-fluorouridine
  modified_base (8)..(8): gm
  modified_base (9)..(9): 2'-deoxy-2'-fluorocytidine
  modified_base (10)..(10): um
  modified_base (11)..(11): um
  modified_base (12)..(12): 2'-deoxy-2'-fluorouridine
  modified_base (13)..(13): 2'-O-methyladenosine
  modified_base (14)..(14): 2'-deoxy-2'-fluorocytidine
  modified_base (15)..(15): 2'-O-methyladenosine
  modified_base (16)..(16): 2'-deoxy-2'-fluoroadenosine
  modified_base (17)..(17): cm
  modified_base (18)..(18): 2'-deoxy-2'-fluorouridine
  modified_base (19)..(19): um
  modified_base (20)..(20): 2'-deoxy-2'-fluoroguanosine
  modified_base (21)..(21): gm
  modified_base (22)..(22): 2'-deoxy-2'-fluorocytidine
  misc_feature (22)..(23): 5'-phosphonothioate
  modified_base (23)..(23): 2'-O-methyladenosine
acaagaugcuuuacaacuuggca

SEQ ID NO: 6573 - RNA, 23 nt, Artificial Sequence
  siRNA antisense strand against b2GPI
  modified_base (1)..(1): 2'-deoxy-2'-fluorouridine
  modified_base (2)..(2): 2'-O-methyladenosine
  misc_feature (2)..(3): 5'-phosphonothioate
  modified_base (3)..(3): 2'-deoxy-2'-fluorocytidine
  modified_base (4)..(4): 2'-O-methyladenosine
  modified_base (5)..(5): 2'-deoxy-2'-fluoroadenosine
  modified_base (6)..(6): gm
  modified_base (7)..(7): 2'-deoxy-2'-fluoroadenosine
  modified_base (8)..(8): um
  modified_base (9)..(9): 2'-deoxy-2'-fluoroguanosine
  modified_base (10)..(10): cm
  modified_base (11)..(11): um
  modified_base (12)..(12): 2'-deoxy-2'-fluorouridine
  modified_base (13)..(13): um
  modified_base (14)..(14): 2'-deoxy-2'-fluoroadenosine
  modified_base (15)..(15): cm
  modified_base (16)..(16): 2'-deoxy-2'-fluoroadenosine
  modified_base (17)..(17): 2'-O-methyladenosine
  modified_base (18)..(18): 2'-deoxy-2'-fluorocytidine
  modified_base (19)..(19): um
  modified_base (20)..(20): 2'-deoxy-2'-fluorouridine
  modified_base (21)..(21): gm
  modified_base (22)..(22): 2'-deoxy-2'-fluoroguanosine
  misc_feature (22)..(23): 5'-phosphonothioate
  modified_base (23)..(23): cm
uacaagaugcuuuacaacuuggc

SEQ ID NO: 6574 - RNA, 23 nt, Artificial Sequence
  siRNA antisense strand against b2GPI
  modified_base (1)..(1): 2'-deoxy-2'-fluorouridine
  modified_base (2)..(2): um
  misc_feature (2)..(3): 5'-phosphonothioate
  modified_base (3)..(3): 2'-deoxy-2'-fluoroadenosine
  modified_base (4)..(4): cm
  modified_base (5)..(5): 2'-deoxy-2'-fluoroadenosine
  modified_base (6)..(6): 2'-O-methyladenosine
  modified_base (7)..(7): 2'-deoxy-2'-fluoroguanosine
  modified_base (8)..(8): 2'-O-methyladenosine
  modified_base (9)..(9): 2'-deoxy-2'-fluorouridine
  modified_base (10)..(10): gm
  modified_base (11)..(11): cm
  modified_base (12)..(12): 2'-deoxy-2'-fluorouridine
  modified_base (13)..(13): um
  modified_base (14)..(14): 2'-deoxy-2'-fluorouridine
  modified_base (15)..(15): 2'-O-methyladenosine
  modified_base (16)..(16): 2'-deoxy-2'-fluorocytidine
  modified_base (17)..(17): 2'-O-methyladenosine
  modified_base (18)..(18): 2'-deoxy-2'-fluoroadenosine
  modified_base (19)..(19): cm
  modified_base (20)..(20): 2'-deoxy-2'-fluorouridine
  modified_base (21)..(21): um
  modified_base (22)..(22): 2'-deoxy-2'-fluoroguanosine
  misc_feature (22)..(23): 5'-phosphonothioate
  modified_base (23)..(23): gm
uuacaagaugcuuuacaacuugg

SEQ ID NO: 6575 - RNA, 23 nt, Artificial Sequence
  siRNA antisense strand against b2GPI
  modified_base (1)..(1): 2'-deoxy-2'-fluorouridine
  modified_base (2)..(2): um
  misc_feature (2)..(3): 5'-phosphonothioate
  modified_base (3)..(3): 2'-deoxy-2'-fluorouridine
  modified_base (4)..(4): 2'-O-methyladenosine
  modified_base (5)..(5): 2'-deoxy-2'-fluorocytidine
  modified_base (6)..(6): 2'-O-methyladenosine
  modified_base (7)..(7): 2'-deoxy-2'-fluoroadenosine
  modified_base (8)..(8): gm
  modified_base (9)..(9): 2'-deoxy-2'-fluoroadenosine
  modified_base (10)..(10): um
  modified_base (11)..(11): gm
  modified_base (12)..(12): 2'-deoxy-2'-fluorocytidine
  modified_base (13)..(13): um
  modified_base (14)..(14): 2'-deoxy-2'-fluorouridine
  modified_base (15)..(15): um
  modified_base (16)..(16): 2'-deoxy-2'-fluoroadenosine
  modified_base (17)..(17): cm
  modified_base (18)..(18): 2'-deoxy-2'-fluoroadenosine
  modified_base (19)..(19): 2'-O-methyladenosine
  modified_base (20)..(20): 2'-deoxy-2'-fluorocytidine
  modified_base (21)..(21): um
  modified_base (22)..(22): 2'-deoxy-2'-fluorouridine
  misc_feature (22)..(23): 5'-phosphonothioate
  modified_base (23)..(23): gm
uuuacaagaugcuuuacaacuug

SEQ ID NO: 6576 - RNA, 23 nt, Artificial Sequence
  siRNA antisense strand against b2GPI
  modified_base (1)..(1): 2'-deoxy-2'-fluorocytidine
  modified_base (2)..(2): um
  misc_feature (2)..(3): 5'-phosphonothioate
  modified_base (3)..(3): 2'-deoxy-2'-fluorouridine
  modified_base (4)..(4): um
  modified_base (5)..(5): 2'-deoxy-2'-fluoroadenosine
  modified_base (6)..(6): cm
  modified_base (7)..(7): 2'-deoxy-2'-fluoroadenosine
  modified_base (8)..(8): 2'-O-methyladenosine
  modified_base (9)..(9): 2'-deoxy-2'-fluoroguanosine
  modified_base (10)..(10): 2'-O-methyladenosine
  modified_base (11)..(11): um
  modified_base (12)..(12): 2'-deoxy-2'-fluoroguanosine
  modified_base (13)..(13): cm
  modified_base (14)..(14): 2'-deoxy-2'-fluorouridine
  modified_base (15)..(15): um
  modified_base (16)..(16): 2'-deoxy-2'-fluorouridine
  modified_base (17)..(17): 2'-O-methyladenosine
  modified_base (18)..(18): 2'-deoxy-2'-fluorocytidine
  modified_base (19)..(19): 2'-O-methyladenosine
  modified_base (20)..(20): 2'-deoxy-2'-fluoroadenosine
  modified_base (21)..(21): cm
  modified_base (22)..(22): 2'-deoxy-2'-fluorouridine
  misc_feature (22)..(23): 5'-phosphonothioate
  modified_base (23)..(23): um
cuuuacaagaugcuuuacaacuu

SEQ ID NO: 6577 - RNA, 23 nt, Artificial Sequence
  siRNA antisense strand against b2GPI
  modified_base (1)..(1): 2'-deoxy-2'-fluorouridine
  modified_base (2)..(2): 2'-O-methyladenosine
  misc_feature (2)..(3): 5'-phosphonothioate
  modified_base (3)..(3): 2'-deoxy-2'-fluorocytidine
  modified_base (4)..(4): um
  modified_base (5)..(5): 2'-deoxy-2'-fluorouridine
  modified_base (6)..(6): um
  modified_base (7)..(7): 2'-deoxy-2'-fluoroadenosine
  modified_base (8)..(8): cm
  modified_base (9)..(9): 2'-deoxy-2'-fluoroadenosine
  modified_base (10)..(10): 2'-O-methyladenosine
  modified_base (11)..(11): gm
  modified_base (12)..(12): 2'-deoxy-2'-fluoroadenosine
  modified_base (13)..(13): um
  modified_base (14)..(14): 2'-deoxy-2'-fluoroguanosine
  modified_base (15)..(15): cm
  modified_base (16)..(16): 2'-deoxy-2'-fluorouridine
  modified_base (17)..(17): um
  modified_base (18)..(18): 2'-deoxy-2'-fluorouridine
  modified_base (19)..(19): 2'-O-methyladenosine
  modified_base (20)..(20): 2'-deoxy-2'-fluorocytidine
  modified_base (21)..(21): 2'-O-methyladenosine
  modified_base (22)..(22): 2'-deoxy-2'-fluoroadenosine
  misc_feature (22)..(23): 5'-phosphonothioate
  modified_base (23)..(23): cm
uacuuuacaagaugcuuuacaac

SEQ ID NO: 6578 - RNA, 23 nt, Artificial Sequence
  siRNA antisense strand against b2GPI
  modified_base (1)..(1): 2'-deoxy-2'-fluoroguanosine
  modified_base (2)..(2): um
  misc_feature (2)..(3): 5'-phosphonothioate
  modified_base (3)..(3): 2'-deoxy-2'-fluoroadenosine
  modified_base (4)..(4): cm
  modified_base (5)..(5): 2'-deoxy-2'-fluorouridine
  modified_base (6)..(6): um
  modified_base (7)..(7): 2'-deoxy-2'-fluorouridine
  modified_base (8)..(8): 2'-O-methyladenosine
  modified_base (9)..(9): 2'-deoxy-2'-fluorocytidine
  modified_base (10)..(10): 2'-O-methyladenosine
  modified_base (11)..(11): 2'-O-methyladenosine
  modified_base (12)..(12): 2'-deoxy-2'-fluoroguanosine
  modified_base (13)..(13): 2'-O-methyladenosine
  modified_base (14)..(14): 2'-deoxy-2'-fluorouridine
  modified_base (15)..(15): gm
  modified_base (16)..(16): 2'-deoxy-2'-fluorocytidine
  modified_base (17)..(17): um
  modified_base (18)..(18): 2'-deoxy-2'-fluorouridine
  modified_base (19)..(19): um
  modified_base (20)..(20): 2'-deoxy-2'-fluoroadenosine
  modified_base (21)..(21): cm
  modified_base (22)..(22): 2'-deoxy-2'-fluoroadenosine
  misc_feature (22)..(23): 5'-phosphonothioate
  modified_base (23)..(23): 2'-O-methyladenosine
guacuuuacaagaugcuuuacaa

SEQ ID NO: 6579 - RNA, 23 nt, Artificial Sequence
  siRNA antisense strand against b2GPI
  modified_base (1)..(1): 2'-deoxy-2'-fluoroadenosine
  modified_base (2)..(2): gm
  misc_feature (2)..(3): 5'-phosphonothioate
  modified_base (3)..(3): 2'-deoxy-2'-fluoroguanosine
  modified_base (4)..(4): um
  modified_base (5)..(5): 2'-deoxy-2'-fluoroadenosine
  modified_base (6)..(6): cm
  modified_base (7)..(7): 2'-deoxy-2'-fluorouridine
  modified_base (8)..(8): um
  modified_base (9)..(9): 2'-deoxy-2'-fluorouridine
  modified_base (10)..(10): 2'-O-methyladenosine
  modified_base (11)..(11): cm
  modified_base (12)..(12): 2'-deoxy-2'-fluoroadenosine
  modified_base (13)..(13): 2'-O-methyladenosine
  modified_base (14)..(14): 2'-deoxy-2'-fluoroguanosine
  modified_base (15)..(15): 2'-O-methyladenosine
  modified_base (16)..(16): 2'-deoxy-2'-fluorouridine
  modified_base (17)..(17): gm
  modified_base (18)..(18): 2'-deoxy-2'-fluorocytidine
  modified_base (19)..(19): um
  modified_base (20)..(20): 2'-deoxy-2'-fluorouridine
  modified_base (21)..(21): um
  modified_base (22)..(22): 2'-deoxy-2'-fluoroadenosine
  misc_feature (22)..(23): 5'-phosphonothioate
  modified_base (23)..(23): cm
agguacuuuacaagaugcuuuac

SEQ ID NO: 6580 - RNA, 23 nt, Artificial Sequence
  siRNA antisense strand against b2GPI
  modified_base (1)..(1): 2'-deoxy-2'-fluoroadenosine
  modified_base (2)..(2): cm
  misc_feature (2)..(3): 5'-phosphonothioate
  modified_base (3)..(3): 2'-deoxy-2'-fluoroadenosine
  modified_base (4)..(4): gm
  modified_base (5)..(5): 2'-deoxy-2'-fluoroguanosine
  modified_base (6)..(6): um
  modified_base (7)..(7): 2'-deoxy-2'-fluoroadenosine
  modified_base (8)..(8): cm
  modified_base (9)..(9): 2'-deoxy-2'-fluorouridine
  modified_base (10)..(10): um
  modified_base (11)..(11): um
  modified_base (12)..(12): 2'-deoxy-2'-fluoroadenosine
  modified_base (13)..(13): cm
  modified_base (14)..(14): 2'-deoxy-2'-fluoroadenosine
  modified_base (15)..(15): 2'-O-methyladenosine
  modified_base (16)..(16): 2'-deoxy-2'-fluoroguanosine
  modified_base (17)..(17): 2'-O-methyladenosine
  modified_base (18)..(18): 2'-deoxy-2'-fluorouridine
  modified_base (19)..(19): gm
  modified_base (20)..(20): 2'-deoxy-2'-fluorocytidine
  modified_base (21)..(21): um
  modified_base (22)..(22): 2'-deoxy-2'-fluorouridine
  misc_feature (22)..(23): 5'-phosphonothioate
  modified_base (23)..(23): um
acagguacuuuacaagaugcuuu

SEQ ID NO: 6581 - RNA, 23 nt, Artificial Sequence
  siRNA antisense strand against b2GPI
  modified_base (1)..(1): 2'-deoxy-2'-fluorouridine
  modified_base (2)..(2): um
  misc_feature (2)..(3): 5'-phosphonothioate
  modified_base (3)..(3): 2'-deoxy-2'-fluorocytidine
  modified_base (4)..(4): 2'-O-methyladenosine
  modified_base (5)..(5): 2'-deoxy-2'-fluorocytidine
  modified_base (6)..(6): 2'-O-methyladenosine
  modified_base (7)..(7): 2'-deoxy-2'-fluoroguanosine
  modified_base (8)..(8): gm
  modified_base (9)..(9): 2'-deoxy-2'-fluorouridine
  modified_base (10)..(10): 2'-O-methyladenosine
  modified_base (11)..(11): cm
  modified_base (12)..(12): 2'-deoxy-2'-fluorouridine
  modified_base (13)..(13): um
  modified_base (14)..(14): 2'-deoxy-2'-fluorouridine
  modified_base (15)..(15): 2'-O-methyladenosine
  modified_base (16)..(16): 2'-deoxy-2'-fluorocytidine
  modified_base (17)..(17): 2'-O-methyladenosine
  modified_base (18)..(18): 2'-deoxy-2'-fluoroadenosine
  modified_base (19)..(19): gm
  modified_base (20)..(20): 2'-deoxy-2'-fluoroadenosine
  modified_base (21)..(21): um
  modified_base (22)..(22): 2'-deoxy-2'-fluoroguanosine
  misc_feature (22)..(23): 5'-phosphonothioate
  modified_base (23)..(23): cm
uucacagguacuuuacaagaugc

SEQ ID NO: 6582 - RNA, 23 nt, Artificial Sequence
  siRNA antisense strand against b2GPI
  modified_base (1)..(1): 2'-deoxy-2'-fluorouridine
  modified_base (2)..(2): um
  misc_feature (2)..(3): 5'-phosphonothioate
  modified_base (3)..(3): 2'-deoxy-2'-fluorouridine
  modified_base (4)..(4): cm
  modified_base (5)..(5): 2'-deoxy-2'-fluoroadenosine
  modified_base (6)..(6): cm
  modified_base (7)..(7): 2'-deoxy-2'-fluoroadenosine
  modified_base (8)..(8): gm
  modified_base (9)..(9): 2'-deoxy-2'-fluoroguanosine
  modified_base (10)..(10): um
  modified_base (11)..(11): 2'-O-methyladenosine
  modified_base (12)..(12): 2'-deoxy-2'-fluorocytidine
  modified_base (13)..(13): um
  modified_base (14)..(14): 2'-deoxy-2'-fluorouridine
  modified_base (15)..(15): um
  modified_base (16)..(16): 2'-deoxy-2'-fluoroadenosine
  modified_base (17)..(17): cm
  modified_base (18)..(18): 2'-deoxy-2'-fluoroadenosine
  modified_base (19)..(19): 2'-O-methyladenosine
  modified_base (20)..(20): 2'-deoxy-2'-fluoroguanosine
  modified_base (21)..(21): 2'-O-methyladenosine
  modified_base (22)..(22): 2'-deoxy-2'-fluorouridine
  misc_feature (22)..(23): 5'-phosphonothioate
  modified_base (23)..(23): gm
uuucacagguacuuuacaagaug

SEQ ID NO: 6583 - RNA, 23 nt, Artificial Sequence
  siRNA antisense strand against b2GPI
  modified_base (1)..(1): 2'-deoxy-2'-fluorouridine
  modified_base (2)..(2): um
  misc_feature (2)..(3): 5'-phosphonothioate
  modified_base (3)..(3): 2'-deoxy-2'-fluorouridine
  modified_base (4)..(4): um
  modified_base (5)..(5): 2'-deoxy-2'-fluorocytidine
  modified_base (6)..(6): 2'-O-methyladenosine
  modified_base (7)..(7): 2'-deoxy-2'-fluorocytidine
  modified_base (8)..(8): 2'-O-methyladenosine
  modified_base (9)..(9): 2'-deoxy-2'-fluoroguanosine
  modified_base (10)..(10): gm
  modified_base (11)..(11): um
  modified_base (12)..(12): 2'-deoxy-2'-fluoroadenosine
  modified_base (13)..(13): cm
  modified_base (14)..(14): 2'-deoxy-2'-fluorouridine
  modified_base (15)..(15): um
  modified_base (16)..(16): 2'-deoxy-2'-fluorouridine
  modified_base (17)..(17): 2'-O-methyladenosine
  modified_base (18)..(18): 2'-deoxy-2'-fluorocytidine
  modified_base (19)..(19): 2'-O-methyladenosine
  modified_base (20)..(20): 2'-deoxy-2'-fluoroadenosine
  modified_base (21)..(21): gm
  modified_base (22)..(22): 2'-deoxy-2'-fluoroadenosine
  misc_feature (22)..(23): 5'-phosphonothioate
  modified_base (23)..(23): um
uuuucacagguacuuuacaagau

SEQ ID NO: 6584 - RNA, 23 nt, Artificial Sequence
  siRNA antisense strand against b2GPI
  modified_base (1)..(1): 2'-deoxy-2'-fluoroguanosine
  modified_base (2)..(2): gm
  misc_feature (2)..(3): 5'-phosphonothioate
  modified_base (3)..(3): 2'-deoxy-2'-fluorocytidine
  modified_base (4)..(4): um
  modified_base (5)..(5): 2'-deoxy-2'-fluorouridine
  modified_base (6)..(6): um
  modified_base (7)..(7): 2'-deoxy-2'-fluorouridine
  modified_base (8)..(8): um
  modified_base (9)..(9): 2'-deoxy-2'-fluorouridine
  modified_base (10)..(10): cm
  modified_base (11)..(11): 2'-O-methyladenosine
  modified_base (12)..(12): 2'-deoxy-2'-fluorocytidine
  modified_base (13)..(13): 2'-O-methyladenosine
  modified_base (14)..(14): 2'-deoxy-2'-fluoroguanosine
  modified_base (15)..(15): gm
  modified_base (16)..(16): 2'-deoxy-2'-fluorouridine
  modified_base (17)..(17): 2'-O-methyladenosine
  modified_base (18)..(18): 2'-deoxy-2'-fluorocytidine
  modified_base (19)..(19): um
  modified_base (20)..(20): 2'-deoxy-2'-fluorouridine
  modified_base (21)..(21): um
  modified_base (22)..(22): 2'-deoxy-2'-fluoroadenosine
  misc_feature (22)..(23): 5'-phosphonothioate
  modified_base (23)..(23): cm
ggcuuuuuucacagguacuuuac

SEQ ID NO: 6585 - RNA, 23 nt, Artificial Sequence
  siRNA antisense strand against b2GPI
  modified_base (1)..(1): 2'-deoxy-2'-fluorouridine
  modified_base (2)..(2): gm
  misc_feature (2)..(3): 5'-phosphonothioate
  modified_base (3)..(3): 2'-deoxy-2'-fluoroguanosine
  modified_base (4)..(4): cm
  modified_base (5)..(5): 2'-deoxy-2'-fluorouridine
  modified_base (6)..(6): um
  modified_base (7)..(7): 2'-deoxy-2'-fluorouridine
  modified_base (8)..(8): um
  modified_base (9)..(9): 2'-deoxy-2'-fluorouridine
  modified_base (10)..(10): um
  modified_base (11)..(11): cm
  modified_base (12)..(12): 2'-deoxy-2'-fluoroadenosine
  modified_base (13)..(13): cm
  modified_base (14)..(14): 2'-deoxy-2'-fluoroadenosine
  modified_base (15)..(15): gm
  modified_base (16)..(16): 2'-deoxy-2'-fluoroguanosine
  modified_base (17)..(17): um
  modified_base (18)..(18): 2'-deoxy-2'-fluoroadenosine
  modified_base (19)..(19): cm
  modified_base (20)..(20): 2'-deoxy-2'-fluorouridine
  modified_base (21)..(21): um
  modified_base (22)..(22): 2'-deoxy-2'-fluorouridine
  misc_feature (22)..(23): 5'-phosphonothioate
  modified_base (23)..(23): 2'-O-methyladenosine
uggcuuuuuucacagguacuuua

SEQ ID NO: 6586 - RNA, 23 nt, Artificial Sequence
  siRNA antisense strand against b2GPI
  modified_base (1)..(1): 2'-deoxy-2'-fluoroguanosine
  modified_base (2)..(2): um
  misc_feature (2)..(3): 5'-phosphonothioate
  modified_base (3)..(3): 2'-deoxy-2'-fluoroguanosine
  modified_base (4)..(4): gm
  modified_base (5)..(5): 2'-deoxy-2'-fluorocytidine
  modified_base (6)..(6): um
  modified_base (7)..(7): 2'-deoxy-2'-fluorouridine
  modified_base (8)..(8): um
  modified_base (9)..(9): 2'-deoxy-2'-fluorouridine
  modified_base (10)..(10): um
  modified_base (11)..(11): um
  modified_base (12)..(12): 2'-deoxy-2'-fluorocytidine
  modified_base (13)..(13): 2'-O-methyladenosine
  modified_base (14)..(14): 2'-deoxy-2'-fluorocytidine
  modified_base (15)..(15): 2'-O-methyladenosine
  modified_base (16)..(16): 2'-deoxy-2'-fluoroguanosine
  modified_base (17)..(17): gm
  modified_base (18)..(18): 2'-deoxy-2'-fluorouridine
  modified_base (19)..(19): 2'-O-methyladenosine
  modified_base (20)..(20): 2'-deoxy-2'-fluorocytidine
  modified_base (21)..(21): um
  modified_base (22)..(22): 2'-deoxy-2'-fluorouridine
  misc_feature (22)..(23): 5'-phosphonothioate
  modified_base (23)..(23): um
guggcuuuuuucacagguacuuu

SEQ ID NO: 6587 - RNA, 23 nt, Artificial Sequence
  siRNA antisense strand against b2GPI
  modified_base (1)..(1): 2'-deoxy-2'-fluoroadenosine
  modified_base (2)..(2): gm
  misc_feature (2)..(3): 5'-phosphonothioate
  modified_base (3)..(3): 2'-deoxy-2'-fluorouridine
  modified_base (4)..(4): gm
  modified_base (5)..(5): 2'-deoxy-2'-fluoroguanosine
  modified_base (6)..(6): cm
  modified_base (7)..(7): 2'-deoxy-2'-fluorouridine
  modified_base (8)..(8): um
  modified_base (9)..(9): 2'-deoxy-2'-fluorouridine
  modified_base (10)..(10): um
  modified_base (11)..(11): um
  modified_base (12)..(12): 2'-deoxy-2'-fluorouridine
  modified_base (13)..(13): cm
  modified_base (14)..(14): 2'-deoxy-2'-fluoroadenosine
  modified_base (15)..(15): cm
  modified_base (16)..(16): 2'-deoxy-2'-fluoroadenosine
  modified_base (17)..(17): gm
  modified_base (18)..(18): 2'-deoxy-2'-fluoroguanosine
  modified_base (19)..(19): um
  modified_base (20)..(20): 2'-deoxy-2'-fluoroadenosine
  modified_base (21)..(21): cm
  modified_base (22)..(22): 2'-deoxy-2'-fluorouridine
  misc_feature (22)..(23): 5'-phosphonothioate
  modified_base (23)..(23): um
aguggcuuuuuucacagguacuu

SEQ ID NO: 6588 - RNA, 23 nt, Artificial Sequence
  siRNA antisense strand against b2GPI
  modified_base (1)..(1): 2'-deoxy-2'-fluoroadenosine
  modified_base (2)..(2): cm
  misc_feature (2)..(3): 5'-phosphonothioate
  modified_base (3)..(3): 2'-deoxy-2'-fluoroadenosine
  modified_base (4)..(4): gm
  modified_base (5)..(5): 2'-deoxy-2'-fluorouridine
  modified_base (6)..(6): gm
  modified_base (7)..(7): 2'-deoxy-2'-fluoroguanosine
  modified_base (8)..(8): cm
  modified_base (9)..(9): 2'-deoxy-2'-fluorouridine
  modified_base (10)..(10): um
  modified_base (11)..(11): um
  modified_base (12)..(12): 2'-deoxy-2'-fluorouridine
  modified_base (13)..(13): um
  modified_base (14)..(14): 2'-deoxy-2'-fluorouridine
  modified_base (15)..(15): cm
  modified_base (16)..(16): 2'-deoxy-2'-fluoroadenosine
  modified_base (17)..(17): cm
  modified_base (18)..(18): 2'-deoxy-2'-fluoroadenosine
  modified_base (19)..(19): gm
  modified_base (20)..(20): 2'-deoxy-2'-fluoroguanosine
  modified_base (21)..(21): um
  modified_base (22)..(22): 2'-deoxy-2'-fluoroadenosine
  misc_feature (22)..(23): 5'-phosphonothioate
  modified_base (23)..(23): cm
acaguggcuuuuuucacagguac

SEQ ID NO: 6589 - RNA, 23 nt, Artificial Sequence
  siRNA antisense strand against b2GPI
  modified_base (1)..(1): 2'-deoxy-2'-fluorocytidine
  modified_base (2)..(2): 2'-O-methyladenosine
  misc_feature (2)..(3): 5'-phosphonothioate
  modified_base (3)..(3): 2'-deoxy-2'-fluorocytidine
  modified_base (4)..(4): 2'-O-methyladenosine
  modified_base (5)..(5): 2'-deoxy-2'-fluoroguanosine
  modified_base (6)..(6): um
  modified_base (7)..(7): 2'-deoxy-2'-fluoroguanosine
  modified_base (8)..(8): gm
  modified_base (9)..(9): 2'-deoxy-2'-fluorocytidine
  modified_base (10)..(10): um
  modified_base (11)..(11): um
  modified_base (12)..(12): 2'-deoxy-2'-fluorouridine
  modified_base (13)..(13): um
  modified_base (14)..(14): 2'-deoxy-2'-fluorouridine
  modified_base (15)..(15): um
  modified_base (16)..(16): 2'-deoxy-2'-fluorocytidine
  modified_base (17)..(17): 2'-O-methyladenosine
  modified_base (18)..(18): 2'-deoxy-2'-fluorocytidine
  modified_base (19)..(19): 2'-O-methyladenosine
  modified_base (20)..(20): 2'-deoxy-2'-fluoroguanosine
  modified_base (21)..(21): gm
  modified_base (22)..(22): 2'-deoxy-2'-fluorouridine
  misc_feature (22)..(23): 5'-phosphonothioate
  modified_base (23)..(23): 2'-O-methyladenosine
cacaguggcuuuuuucacaggua

SEQ ID NO: 6590 - RNA, 23 nt, Artificial Sequence
  siRNA antisense strand against b2GPI
  modified_base (1)..(1): 2'-deoxy-2'-fluorocytidine
  modified_base (2)..(2): cm
  misc_feature (2)..(3): 5'-phosphonothioate
  modified_base (3)..(3): 2'-deoxy-2'-fluoroadenosine
  modified_base (4)..(4): cm
  modified_base (5)..(5): 2'-deoxy-2'-fluoroadenosine
  modified_base (6)..(6): gm
  modified_base (7)..(7): 2'-deoxy-2'-fluorouridine
  modified_base (8)..(8): gm
  modified_base (9)..(9): 2'-deoxy-2'-fluoroguanosine
  modified_base (10)..(10): cm
  modified_base (11)..(11): um
  modified_base (12)..(12): 2'-deoxy-2'-fluorouridine
  modified_base (13)..(13): um
  modified_base (14)..(14): 2'-deoxy-2'-fluorouridine
  modified_base (15)..(15): um
  modified_base (16)..(16): 2'-deoxy-2'-fluorouridine
  modified_base (17)..(17): cm
  modified_base (18)..(18): 2'-deoxy-2'-fluoroadenosine
  modified_base (19)..(19): cm
  modified_base (20)..(20): 2'-deoxy-2'-fluoroadenosine
  modified_base (21)..(21): gm
  modified_base (22)..(22): 2'-deoxy-2'-fluoroguanosine
  misc_feature (22)..(23): 5'-phosphonothioate
  modified_base (23)..(23): um
ccacaguggcuuuuuucacaggu

SEQ ID NO: 6591 - RNA, 23 nt, Artificial Sequence
  siRNA antisense strand against b2GPI
  modified_base (1)..(1): 2'-deoxy-2'-fluoroadenosine
  modified_base (2)..(2): cm
  misc_feature (2)..(3): 5'-phosphonothioate
  modified_base (3)..(3): 2'-deoxy-2'-fluorocytidine
  modified_base (4)..(4): 2'-O-methyladenosine
  modified_base (5)..(5): 2'-deoxy-2'-fluorocytidine
  modified_base (6)..(6): 2'-O-methyladenosine
  modified_base (7)..(7): 2'-deoxy-2'-fluoroguanosine
  modified_base (8)..(8): um
  modified_base (9)..(9): 2'-deoxy-2'-fluoroguanosine
  modified_base (10)..(10): gm
  modified_base (11)..(11): cm
  modified_base (12)..(12): 2'-deoxy-2'-fluorouridine
  modified_base (13)..(13): um
  modified_base (14)..(14): 2'-deoxy-2'-fluorouridine
  modified_base (15)..(15): um
  modified_base (16)..(16): 2'-deoxy-2'-fluorouridine
  modified_base (17)..(17): um
  modified_base (18)..(18): 2'-deoxy-2'-fluorocytidine
  modified_base (19)..(19): 2'-O-methyladenosine
  modified_base (20)..(20): 2'-deoxy-2'-fluorocytidine
  modified_base (21)..(21): 2'-O-methyladenosine
  modified_base (22)..(22): 2'-deoxy-2'-fluoroguanosine
  misc_feature (22)..(23): 5'-phosphonothioate
  modified_base (23)..(23): gm
accacaguggcuuuuuucacagg

SEQ ID NO: 6592 - RNA, 23 nt, Artificial Sequence
  siRNA antisense strand against b2GPI
  modified_base (1)..(1): 2'-deoxy-2'-fluorocytidine
  modified_base (2)..(2): 2'-O-methyladenosine
  misc_feature (2)..(3): 5'-phosphonothioate
  modified_base (3)..(3): 2'-deoxy-2'-fluorocytidine
  modified_base (4)..(4): cm
  modified_base (5)..(5): 2'-deoxy-2'-fluoroadenosine
  modified_base (6)..(6): cm
  modified_base (7)..(7): 2'-deoxy-2'-fluoroadenosine
  modified_base (8)..(8): gm
  modified_base (9)..(9): 2'-deoxy-2'-fluorouridine
  modified_base (10)..(10): gm
  modified_base (11)..(11): gm
  modified_base (12)..(12): 2'-deoxy-2'-fluorocytidine
  modified_base (13)..(13): um
  modified_base (14)..(14): 2'-deoxy-2'-fluorouridine
  modified_base (15)..(15): um
  modified_base (16)..(16): 2'-deoxy-2'-fluorouridine
  modified_base (17)..(17): um
  modified_base (18)..(18): 2'-deoxy-2'-fluorouridine
  modified_base (19)..(19): cm
  modified_base (20)..(20): 2'-deoxy-2'-fluoroadenosine
  modified_base (21)..(21): cm
  modified_base (22)..(22): 2'-deoxy-2'-fluoroadenosine
  misc_feature (22)..(23): 5'-phosphonothioate
  modified_base (23)..(23): gm
caccacaguggcuuuuuucacag

SEQ ID NO: 6593 - RNA, 23 nt, Artificial Sequence
  siRNA antisense strand against b2GPI
  modified_base (1)..(1): 2'-deoxy-2'-fluorouridine
  modified_base (2)..(2): 2'-O-methyladenosine
  misc_feature (2)..(3): 5'-phosphonothioate
  modified_base (3)..(3): 2'-deoxy-2'-fluorocytidine
  modified_base (4)..(4): 2'-O-methyladenosine
  modified_base (5)..(5): 2'-deoxy-2'-fluorocytidine
  modified_base (6)..(6): cm
  modified_base (7)..(7): 2'-deoxy-2'-fluoroadenosine
  modified_base (8)..(8): cm
  modified_base (9)..(9): 2'-deoxy-2'-fluoroadenosine
  modified_base (10)..(10): gm
  modified_base (11)..(11): um
  modified_base (12)..(12): 2'-deoxy-2'-fluoroguanosine
  modified_base (13)..(13): gm
  modified_base (14)..(14): 2'-deoxy-2'-fluorocytidine
  modified_base (15)..(15): um
  modified_base (16)..(16): 2'-deoxy-2'-fluorouridine
  modified_base (17)..(17): um
  modified_base (18)..(18): 2'-deoxy-2'-fluorouridine
  modified_base (19)..(19): um
  modified_base (20)..(20): 2'-deoxy-2'-fluorouridine
  modified_base (21)..(21): cm
  modified_base (22)..(22): 2'-deoxy-2'-fluoroadenosine
  misc_feature (22)..(23): 5'-phosphonothioate
  modified_base (23)..(23): cm
uacaccacaguggcuuuuuucac

SEQ ID NO: 6594 - RNA, 23 nt, Artificial Sequence
  siRNA antisense strand against b2GPI
  modified_base (1)..(1): 2'-deoxy-2'-fluoroguanosine
  modified_base (2)..(2): um
  misc_feature (2)..(3): 5'-phosphonothioate
  modified_base (3)..(3): 2'-deoxy-2'-fluoroadenosine
  modified_base (4)..(4): cm
  modified_base (5)..(5): 2'-deoxy-2'-fluoroadenosine
  modified_base (6)..(6): cm
  modified_base (7)..(7): 2'-deoxy-2'-fluorocytidine
  modified_base (8)..(8): 2'-O-methyladenosine
  modified_base (9)..(9): 2'-deoxy-2'-fluorocytidine
  modified_base (10)..(10): 2'-O-methyladenosine
  modified_base (11)..(11): gm
  modified_base (12)..(12): 2'-deoxy-2'-fluorouridine
  modified_base (13)..(13): gm
  modified_base (14)..(14): 2'-deoxy-2'-fluoroguanosine
  modified_base (15)..(15): cm
  modified_base (16)..(16): 2'-deoxy-2'-fluorouridine
  modified_base (17)..(17): um
  modified_base (18)..(18): 2'-deoxy-2'-fluorouridine
  modified_base (19)..(19): um
  modified_base (20)..(20): 2'-deoxy-2'-fluorouridine
  modified_base (21)..(21): um
  modified_base (22)..(22): 2'-deoxy-2'-fluorocytidine
  misc_feature (22)..(23): 5'-phosphonothioate
  modified_base (23)..(23): 2'-O-methyladenosine
guacaccacaguggcuuuuuuca

SEQ ID NO: 6595 - RNA, 23 nt, Artificial Sequence
  siRNA antisense strand against b2GPI
  modified_base (1)..(1): 2'-deoxy-2'-fluorouridine
  modified_base (2)..(2): gm
  misc_feature (2)..(3): 5'-phosphonothioate
  modified_base (3)..(3): 2'-deoxy-2'-fluoroguanosine
  modified_base (4)..(4): um
  modified_base (5)..(5): 2'-deoxy-2'-fluoroadenosine
  modified_base (6)..(6): cm
  modified_base (7)..(7): 2'-deoxy-2'-fluoroadenosine
  modified_base (8)..(8): cm
  modified_base (9)..(9): 2'-deoxy-2'-fluorocytidine
  modified_base (10)..(10): 2'-O-methyladenosine
  modified_base (11)..(11): cm
  modified_base (12)..(12): 2'-deoxy-2'-fluoroadenosine
  modified_base (13)..(13): gm
  modified_base (14)..(14): 2'-deoxy-2'-fluorouridine
  modified_base (15)..(15): gm
  modified_base (16)..(16): 2'-deoxy-2'-fluoroguanosine
  modified_base (17)..(17): cm
  modified_base (18)..(18): 2'-deoxy-2'-fluorouridine
  modified_base (19)..(19): um
  modified_base (20)..(20): 2'-deoxy-2'-fluorouridine
  modified_base (21)..(21): um
  modified_base (22)..(22): 2'-deoxy-2'-fluorouridine
  misc_feature (22)..(23): 5'-phosphonothioate
  modified_base (23)..(23): um
ugguacaccacaguggcuuuuuu

SEQ ID NO: 6596 - RNA, 23 nt, Artificial Sequence
  siRNA antisense strand against b2GPI
  modified_base (1)..(1): 2'-deoxy-2'-fluorouridine
  modified_base (2)..(2): um
  misc_feature (2)..(3): 5'-phosphonothioate
  modified_base (3)..(3): 2'-deoxy-2'-fluoroguanosine
  modified_base (4)..(4): gm
  modified_base (5)..(5): 2'-deoxy-2'-fluorouridine
  modified_base (6)..(6): 2'-O-methyladenosine
  modified_base (7)..(7): 2'-deoxy-2'-fluorocytidine
  modified_base (8)..(8): 2'-O-methyladenosine
  modified_base (9)..(9): 2'-deoxy-2'-fluorocytidine
  modified_base (10)..(10): cm
  modified_base (11)..(11): 2'-O-methyladenosine
  modified_base (12)..(12): 2'-deoxy-2'-fluorocytidine
  modified_base (13)..(13): 2'-O-methyladenosine
  modified_base (14)..(14): 2'-deoxy-2'-fluoroguanosine
  modified_base (15)..(15): um
  modified_base (16)..(16): 2'-deoxy-2'-fluoroguanosine
  modified_base (17)..(17): gm
  modified_base (18)..(18): 2'-deoxy-2'-fluorocytidine
  modified_base (19)..(19): um
  modified_base (20)..(20): 2'-deoxy-2'-fluorouridine
  modified_base (21)..(21): um
  modified_base (22)..(22): 2'-deoxy-2'-fluorouridine
  misc_feature (22)..(23): 5'-phosphonothioate
  modified_base (23)..(23): um
uugguacaccacaguggcuuuuu

SEQ ID NO: 6597 - RNA, 23 nt, Artificial Sequence
  siRNA antisense strand against b2GPI
  modified_base (1)..(1): 2'-deoxy-2'-fluorocytidine
  modified_base (2)..(2): um
  misc_feature (2)..(3): 5'-phosphonothioate
  modified_base (3)..(3): 2'-deoxy-2'-fluorouridine
  modified_base (4)..(4): gm
  modified_base (5)..(5): 2'-deoxy-2'-fluoroguanosine
  modified_base (6)..(6): um
  modified_base (7)..(7): 2'-deoxy-2'-fluoroadenosine
  modified_base (8)..(8): cm
  modified_base (9)..(9): 2'-deoxy-2'-fluoroadenosine
  modified_base (10)..(10): cm
  modified_base (11)..(11): cm
  modified_base (12)..(12): 2'-deoxy-2'-fluoroadenosine
  modified_base (13)..(13): cm
  modified_base (14)..(14): 2'-deoxy-2'-fluoroadenosine
  modified_base (15)..(15): gm
  modified_base (16)..(16): 2'-deoxy-2'-fluorouridine
  modified_base (17)..(17): gm
  modified_base (18)..(18): 2'-deoxy-2'-fluoroguanosine
  modified_base (19)..(19): cm
  modified_base (20)..(20): 2'-deoxy-2'-fluorouridine
  modified_base (21)..(21): um
  modified_base (22)..(22): 2'-deoxy-2'-fluorouridine
  misc_feature (22)..(23): 5'-phosphonothioate
  modified_base (23)..(23): um
cuugguacaccacaguggcuuuu

SEQ ID NO: 6598 - RNA, 23 nt, Artificial Sequence
  siRNA antisense strand against b2GPI
  modified_base (1)..(1): 2'-deoxy-2'-fluorouridine
  modified_base (2)..(2): cm
  misc_feature (2)..(3): 5'-phosphonothioate
  modified_base (3)..(3): 2'-deoxy-2'-fluorocytidine
  modified_base (4)..(4): um
  modified_base (5)..(5): 2'-deoxy-2'-fluorouridine
  modified_base (6)..(6): gm
  modified_base (7)..(7): 2'-deoxy-2'-fluoroguanosine
  modified_base (8)..(8): um
  modified_base (9)..(9): 2'-deoxy-2'-fluoroadenosine
  modified_base (10)..(10): cm
  modified_base (11)..(11): 2'-O-methyladenosine
  modified_base (12)..(12): 2'-deoxy-2'-fluorocytidine
  modified_base (13)..(13): cm
  modified_base (14)..(14): 2'-deoxy-2'-fluoroadenosine
  modified_base (15)..(15): cm
  modified_base (16)..(16): 2'-deoxy-2'-fluoroadenosine
  modified_base (17)..(17): gm
  modified_base (18)..(18): 2'-deoxy-2'-fluorouridine
  modified_base (19)..(19): gm
  modified_base (20)..(20): 2'-deoxy-2'-fluoroguanosine
  modified_base (21)..(21): cm
  modified_base (22)..(22): 2'-deoxy-2'-fluorouridine
  misc_feature (22)..(23): 5'-phosphonothioate
  modified_base (23)..(23): um
uccuugguacaccacaguggcuu

SEQ ID NO: 6599 - RNA, 23 nt, Artificial Sequence
  siRNA antisense strand against b2GPI
  modified_base (1)..(1): 2'-deoxy-2'-fluorouridine
  modified_base (2)..(2): cm
  misc_feature (2)..(3): 5'-phosphonothioate
  modified_base (3)..(3): 2'-deoxy-2'-fluorouridine
  modified_base (4)..(4): cm
  modified_base (5)..(5): 2'-deoxy-2'-fluorocytidine
  modified_base (6)..(6): um
  modified_base (7)..(7): 2'-deoxy-2'-fluorouridine
  modified_base (8)..(8): gm
  modified_base (9)..(9): 2'-deoxy-2'-fluoroguanosine
  modified_base (10)..(10): um
  modified_base (11)..(11): 2'-O-methyladenosine
  modified_base (12)..(12): 2'-deoxy-2'-fluorocytidine
  modified_base (13)..(13): 2'-O-methyladenosine
  modified_base (14)..(14): 2'-deoxy-2'-fluorocytidine
  modified_base (15)..(15): cm
  modified_base (16)..(16): 2'-deoxy-2'-fluoroadenosine
  modified_base (17)..(17): cm
  modified_base (18)..(18): 2'-deoxy-2'-fluoroadenosine
  modified_base (19)..(19): gm
  modified_base (20)..(20): 2'-deoxy-2'-fluorouridine
  modified_base (21)..(21): gm
  modified_base (22)..(22): 2'-deoxy-2'-fluoroguanosine
  misc_feature (22)..(23): 5'-phosphonothioate
  modified_base (23)..(23): cm
ucuccuugguacaccacaguggc

SEQ ID NO: 6600 - RNA, 23 nt, Artificial Sequence
  siRNA antisense strand against b2GPI
  modified_base (1)..(1): 2'-deoxy-2'-fluorocytidine
  modified_base (2)..(2): um
  misc_feature (2)..(3): 5'-phosphonothioate
  modified_base (3)..(3): 2'-deoxy-2'-fluorocytidine
  modified_base (4)..(4): um
  modified_base (5)..(5): 2'-deoxy-2'-fluorocytidine
  modified_base (6)..(6): cm
  modified_base (7)..(7): 2'-deoxy-2'-fluorouridine
  modified_base (8)..(8): um
  modified_base (9)..(9): 2'-deoxy-2'-fluoroguanosine
  modified_base (10)..(10): gm
  modified_base (11)..(11): um
  modified_base (12)..(12): 2'-deoxy-2'-fluoroadenosine
  modified_base (13)..(13): cm
  modified_base (14)..(14): 2'-deoxy-2'-fluoroadenosine
  modified_base (15)..(15): cm
  modified_base (16)..(16): 2'-deoxy-2'-fluorocytidine
  modified_base (17)..(17): 2'-O-methyladenosine
  modified_base (18)..(18): 2'-deoxy-2'-fluorocytidine
  modified_base (19)..(19): 2'-O-methyladenosine
  modified_base (20)..(20): 2'-deoxy-2'-fluoroguanosine
  modified_base (21)..(21): um
  modified_base (22)..(22): 2'-deoxy-2'-fluoroguanosine
  misc_feature (22)..(23): 5'-phosphonothioate
  modified_base (23)..(23): gm
cucuccuugguacaccacagugg

SEQ ID NO: 6601 - RNA, 23 nt, Artificial Sequence
  siRNA antisense strand against b2GPI
  modified_base (1)..(1): 2'-deoxy-2'-fluorouridine
  modified_base (2)..(2): cm
  misc_feature (2)..(3): 5'-phosphonothioate
  modified_base (3)..(3): 2'-deoxy-2'-fluorouridine
  modified_base (4)..(4): cm
  modified_base (5)..(5): 2'-deoxy-2'-fluorouridine
  modified_base (6)..(6): cm
  modified_base (7)..(7): 2'-deoxy-2'-fluorocytidine
  modified_base (8)..(8): um
  modified_base (9)..(9): 2'-deoxy-2'-fluorouridine
  modified_base (10)..(10): gm
  modified_base (11)..(11): gm
  modified_base (12)..(12): 2'-deoxy-2'-fluorouridine
  modified_base (13)..(13): 2'-O-methyladenosine
  modified_base (14)..(14): 2'-deoxy-2'-fluorocytidine
  modified_base (15)..(15): 2'-O-methyladenosine
  modified_base (16)..(16): 2'-deoxy-2'-fluorocytidine
  modified_base (17)..(17): cm
  modified_base (18)..(18): 2'-deoxy-2'-fluoroadenosine
  modified_base (19)..(19): cm
  modified_base (20)..(20): 2'-deoxy-2'-fluoroadenosine
  modified_base (21)..(21): gm
  modified_base (22)..(22): 2'-deoxy-2'-fluorouridine
  misc_feature (22)..(23): 5'-phosphonothioate
  modified_base (23)..(23): gm
ucucuccuugguacaccacagug

SEQ ID NO: 6602 - RNA, 23 nt, Artificial Sequence
  siRNA antisense strand against b2GPI
  modified_base (1)..(1): 2'-deoxy-2'-fluorocytidine
  modified_base (2)..(2): um
  misc_feature (2)..(3): 5'-phosphonothioate
  modified_base (3)..(3): 2'-deoxy-2'-fluorocytidine
  modified_base (4)..(4): um
  modified_base (5)..(5): 2'-deoxy-2'-fluorocytidine
  modified_base (6)..(6): um
  modified_base (7)..(7): 2'-deoxy-2'-fluorocytidine
  modified_base (8)..(8): cm
  modified_base (9)..(9): 2'-deoxy-2'-fluorouridine
  modified_base (10)..(10): um
  modified_base (11)..(11): gm
  modified_base (12)..(12): 2'-deoxy-2'-fluoroguanosine
  modified_base (13)..(13): um
  modified_base (14)..(14): 2'-deoxy-2'-fluoroadenosine
  modified_base (15)..(15): cm
  modified_base (16)..(16): 2'-deoxy-2'-fluoroadenosine
  modified_base (17)..(17): cm
  modified_base (18)..(18): 2'-deoxy-2'-fluorocytidine
  modified_base (19)..(19): 2'-O-methyladenosine
  modified_base (20)..(20): 2'-deoxy-2'-fluorocytidine
  modified_base (21)..(21): 2'-O-methyladenosine
  modified_base (22)..(22): 2'-deoxy-2'-fluoroguanosine
  misc_feature (22)..(23): 5'-phosphonothioate
  modified_base (23)..(23): um
cucucuccuugguacaccacagu

SEQ ID NO: 6603 - RNA, 23 nt, Artificial Sequence
  siRNA antisense strand against b2GPI
  modified_base (1)..(1): 2'-deoxy-2'-fluorouridine
  modified_base (2)..(2): cm
  misc_feature (2)..(3): 5'-phosphonothioate
  modified_base (3)..(3): 2'-deoxy-2'-fluorouridine
  modified_base (4)..(4): cm
  modified_base (5)..(5): 2'-deoxy-2'-fluorouridine
  modified_base (6)..(6): cm
  modified_base (7)..(7): 2'-deoxy-2'-fluorouridine
  modified_base (8)..(8): cm
  modified_base (9)..(9): 2'-deoxy-2'-fluorocytidine
  modified_base (10)..(10): um
  modified_base (11)..(11): um
  modified_base (12)..(12): 2'-deoxy-2'-fluoroguanosine
  modified_base (13)..(13): gm
  modified_base (14)..(14): 2'-deoxy-2'-fluorouridine
  modified_base (15)..(15): 2'-O-methyladenosine
  modified_base (16)..(16): 2'-deoxy-2'-fluorocytidine
  modified_base (17)..(17): 2'-O-methyladenosine
  modified_base (18)..(18): 2'-deoxy-2'-fluorocytidine
  modified_base (19)..(19): cm
  modified_base (20)..(20): 2'-deoxy-2'-fluoroadenosine
  modified_base (21)..(21): cm
  modified_base (22)..(22): 2'-deoxy-2'-fluoroadenosine
  misc_feature (22)..(23): 5'-phosphonothioate
  modified_base (23)..(23): gm
ucucucuccuugguacaccacag

SEQ ID NO: 6604 - RNA, 23 nt, Artificial Sequence
  siRNA antisense strand against b2GPI
  modified_base (1)..(1): 2'-deoxy-2'-fluorocytidine
  modified_base (2)..(2): um
  misc_feature (2)..(3): 5'-phosphonothioate
  modified_base (3)..(3): 2'-deoxy-2'-fluorocytidine
  modified_base (4)..(4): um
  modified_base (5)..(5): 2'-deoxy-2'-fluorocytidine
  modified_base (6)..(6): um
  modified_base (7)..(7): 2'-deoxy-2'-fluorocytidine
  modified_base (8)..(8): um
  modified_base (9)..(9): 2'-deoxy-2'-fluorocytidine
  modified_base (10)..(10): cm
  modified_base (11)..(11): um
  modified_base (12)..(12): 2'-deoxy-2'-fluorouridine
  modified_base (13)..(13): gm
  modified_base (14)..(14): 2'-deoxy-2'-fluoroguanosine
  modified_base (15)..(15): um
  modified_base (16)..(16): 2'-deoxy-2'-fluoroadenosine
  modified_base (17)..(17): cm
  modified_base (18)..(18): 2'-deoxy-2'-fluoroadenosine
  modified_base (19)..(19): cm
  modified_base (20)..(20): 2'-deoxy-2'-fluorocytidine
  modified_base (21)..(21): 2'-O-methyladenosine
  modified_base (22)..(22): 2'-deoxy-2'-fluorocytidine
  misc_feature (22)..(23): 5'-phosphonothioate
  modified_base (23)..(23): 2'-O-methyladenosine
cucucucuccuugguacaccaca

SEQ ID NO: 6605 - RNA, 23 nt, Artificial Sequence
  siRNA antisense strand against b2GPI
  modified_base (1)..(1): 2'-deoxy-2'-fluorouridine
  modified_base (2)..(2): 2'-O-methyladenosine
  misc_feature (2)..(3): 5'-phosphonothioate
  modified_base (3)..(3): 2'-deoxy-2'-fluorocytidine
  modified_base (4)..(4): um
  modified_base (5)..(5): 2'-deoxy-2'-fluorocytidine
  modified_base (6)..(6): um
  modified_base (7)..(7): 2'-deoxy-2'-fluorocytidine
  modified_base (8)..(8): um
  modified_base (9)..(9): 2'-deoxy-2'-fluorocytidine
  modified_base (10)..(10): um
  modified_base (11)..(11): cm
  modified_base (12)..(12): 2'-deoxy-2'-fluorocytidine
  modified_base (13)..(13): um
  modified_base (14)..(14): 2'-deoxy-2'-fluorouridine
  modified_base (15)..(15): gm
  modified_base (16)..(16): 2'-deoxy-2'-fluoroguanosine
  modified_base (17)..(17): um
  modified_base (18)..(18): 2'-deoxy-2'-fluoroadenosine
  modified_base (19)..(19): cm
  modified_base (20)..(20): 2'-deoxy-2'-fluoroadenosine
  modified_base (21)..(21): cm
  modified_base (22)..(22): 2'-deoxy-2'-fluorocytidine
  misc_feature (22)..(23): 5'-phosphonothioate
  modified_base (23)..(23): 2'-O-methyladenosine
uacucucucuccuugguacacca

SEQ ID NO: 6606 - RNA, 23 nt, Artificial Sequence
  siRNA antisense strand against b2GPI
  modified_base (1)..(1): 2'-deoxy-2'-fluorouridine
  modified_base (2)..(2): um
  misc_feature (2)..(3): 5'-phosphonothioate
  modified_base (3)..(3): 2'-deoxy-2'-fluoroadenosine
  modified_base (4)..(4): cm
  modified_base (5)..(5): 2'-deoxy-2'-fluorouridine
  modified_base (6)..(6): cm
  modified_base (7)..(7): 2'-deoxy-2'-fluorouridine
  modified_base (8)..(8): cm
  modified_base (9)..(9): 2'-deoxy-2'-fluorouridine
  modified_base (10)..(10): cm
  modified_base (11)..(11): um
  modified_base (12)..(12): 2'-deoxy-2'-fluorocytidine
  modified_base (13)..(13): cm
  modified_base (14)..(14): 2'-deoxy-2'-fluorouridine
  modified_base (15)..(15): um
  modified_base (16)..(16): 2'-deoxy-2'-fluoroguanosine
  modified_base (17)..(17): gm
  modified_base (18)..(18): 2'-deoxy-2'-fluorouridine
  modified_base (19)..(19): 2'-O-methyladenosine
  modified_base (20)..(20): 2'-deoxy-2'-fluorocytidine
  modified_base (21)..(21): 2'-O-methyladenosine
  modified_base (22)..(22): 2'-deoxy-2'-fluorocytidine
  misc_feature (22)..(23): 5'-phosphonothioate
  modified_base (23)..(23): cm
uuacucucucuccuugguacacc

SEQ ID NO: 6607 - RNA, 23 nt, Artificial Sequence
  siRNA antisense strand against b2GPI
  modified_base (1)..(1): 2'-deoxy-2'-fluorouridine
  modified_base (2)..(2): um
  misc_feature (2)..(3): 5'-phosphonothioate
  modified_base (3)..(3): 2'-deoxy-2'-fluorouridine
  modified_base (4)..(4): 2'-O-methyladenosine
  modified_base (5)..(5): 2'-deoxy-2'-fluorocytidine
  modified_base (6)..(6): um
  modified_base (7)..(7): 2'-deoxy-2'-fluorocytidine
  modified_base (8)..(8): um
  modified_base (9)..(9): 2'-deoxy-2'-fluorocytidine
  modified_base (10)..(10): um
  modified_base (11)..(11): cm
  modified_base (12)..(12): 2'-deoxy-2'-fluorouridine
  modified_base (13)..(13): cm
  modified_base (14)..(14): 2'-deoxy-2'-fluorocytidine
  modified_base (15)..(15): um
  modified_base (16)..(16): 2'-deoxy-2'-fluorouridine
  modified_base (17)..(17): gm
  modified_base (18)..(18): 2'-deoxy-2'-fluoroguanosine
  modified_base (19)..(19): um
  modified_base (20)..(20): 2'-deoxy-2'-fluoroadenosine
  modified_base (21)..(21): cm
  modified_base (22)..(22): 2'-deoxy-2'-fluoroadenosine
  misc_feature (22)..(23): 5'-phosphonothioate
  modified_base (23)..(23): cm
uuuacucucucuccuugguacac

SEQ ID NO: 6608 - RNA, 23 nt, Artificial Sequence
  siRNA antisense strand against b2GPI
  modified_base (1)..(1): 2'-deoxy-2'-fluorocytidine
  modified_base (2)..(2): um
  misc_feature (2)..(3): 5'-phosphonothioate
  modified_base (3)..(3): 2'-deoxy-2'-fluorouridine
  modified_base (4)..(4): um
  modified_base (5)..(5): 2'-deoxy-2'-fluoroadenosine
  modified_base (6)..(6): cm
  modified_base (7)..(7): 2'-deoxy-2'-fluorouridine
  modified_base (8)..(8): cm
  modified_base (9)..(9): 2'-deoxy-2'-fluorouridine
  modified_base (10)..(10): cm
  modified_base (11)..(11): um
  modified_base (12)..(12): 2'-deoxy-2'-fluorocytidine
  modified_base (13)..(13): um
  modified_base (14)..(14): 2'-deoxy-2'-fluorocytidine
  modified_base (15)..(15): cm
  modified_base (16)..(16): 2'-deoxy-2'-fluorouridine
  modified_base (17)..(17): um
  modified_base (18)..(18): 2'-deoxy-2'-fluoroguanosine
  modified_base (19)..(19): gm
  modified_base (20)..(20): 2'-deoxy-2'-fluorouridine
  modified_base (21)..(21): 2'-O-methyladenosine
  modified_base (22)..(22): 2'-deoxy-2'-fluorocytidine
  misc_feature (22)..(23): 5'-phosphonothioate
  modified_base (23)..(23): 2'-O-methyladenosine
cuuuacucucucuccuugguaca

SEQ ID NO: 6609 - RNA, 23 nt, Artificial Sequence
  siRNA antisense strand against b2GPI
  modified_base (1)..(1): 2'-deoxy-2'-fluorouridine
  modified_base (2)..(2): cm
  misc_feature (2)..(3): 5'-phosphonothioate
  modified_base (3)..(3): 2'-deoxy-2'-fluorouridine
  modified_base (4)..(4): um
  modified_base (5)..(5): 2'-deoxy-2'-fluorouridine
  modified_base (6)..(6): 2'-O-methyladenosine
  modified_base (7)..(7): 2'-deoxy-2'-fluorocytidine
  modified_base (8)..(8): um
  modified_base (9)..(9): 2'-deoxy-2'-fluorocytidine
  modified_base (10)..(10): um
  modified_base (11)..(11): cm
  modified_base (12)..(12): 2'-deoxy-2'-fluorouridine
  modified_base (13)..(13): cm
  modified_base (14)..(14): 2'-deoxy-2'-fluorouridine
  modified_base (15)..(15): cm
  modified_base (16)..(16): 2'-deoxy-2'-fluorocytidine
  modified_base (17)..(17): um
  modified_base (18)..(18): 2'-deoxy-2'-fluorouridine
  modified_base (19)..(19): gm
  modified_base (20)..(20): 2'-deoxy-2'-fluoroguanosine
  modified_base (21)..(21): um
  modified_base (22)..(22): 2'-deoxy-2'-fluoroadenosine
  misc_feature (22)..(23): 5'-phosphonothioate
  modified_base (23)..(23): cm
ucuuuacucucucuccuugguac

SEQ ID NO: 6610 - RNA, 23 nt, Artificial Sequence
  siRNA antisense strand against b2GPI
  modified_base (1)..(1): 2'-deoxy-2'-fluoroadenosine
  modified_base (2)..(2): um
  misc_feature (2)..(3): 5'-phosphonothioate
  modified_base (3)..(3): 2'-deoxy-2'-fluorocytidine
  modified_base (4)..(4): um
  modified_base (5)..(5): 2'-deoxy-2'-fluorouridine
  modified_base (6)..(6): um
  modified_base (7)..(7): 2'-deoxy-2'-fluoroadenosine
  modified_base (8)..(8): cm
  modified_base (9)..(9): 2'-deoxy-2'-fluorouridine
  modified_base (10)..(10): cm
  modified_base (11)..(11): um
  modified_base (12)..(12): 2'-deoxy-2'-fluorocytidine
  modified_base (13)..(13): um
  modified_base (14)..(14): 2'-deoxy-2'-fluorocytidine
  modified_base (15)..(15): um
  modified_base (16)..(16): 2'-deoxy-2'-fluorocytidine
  modified_base (17)..(17): cm
  modified_base (18)..(18): 2'-deoxy-2'-fluorouridine
  modified_base (19)..(19): um
  modified_base (20)..(20): 2'-deoxy-2'-fluoroguanosine
  modified_base (21)..(21): gm
  modified_base (22)..(22): 2'-deoxy-2'-fluorouridine
  misc_feature (22)..(23): 5'-phosphonothioate
  modified_base (23)..(23): 2'-O-methyladenosine
aucuuuacucucucuccuuggua

SEQ ID NO: 6611 - RNA, 23 nt, Artificial Sequence
  siRNA antisense strand against b2GPI
  modified_base (1)..(1): 2'-deoxy-2'-fluoroadenosine
  modified_base (2)..(2): 2'-O-methyladenosine
  misc_feature (2)..(3): 5'-phosphonothioate
  modified_base (3)..(3): 2'-deoxy-2'-fluorouridine
  modified_base (4)..(4): cm
  modified_base (5)..(5): 2'-deoxy-2'-fluorouridine
  modified_base (6)..(6): um
  modified_base (7)..(7): 2'-deoxy-2'-fluorouridine
  modified_base (8)..(8): 2'-O-methyladenosine
  modified_base (9)..(9): 2'-deoxy-2'-fluorocytidine
  modified_base (10)..(10): um
  modified_base (11)..(11): cm
  modified_base (12)..(12): 2'-deoxy-2'-fluorouridine
  modified_base (13)..(13): cm
  modified_base (14)..(14): 2'-deoxy-2'-fluorouridine
  modified_base (15)..(15): cm
  modified_base (16)..(16): 2'-deoxy-2'-fluorouridine
  modified_base (17)..(17): cm
  modified_base (18)..(18): 2'-deoxy-2'-fluorocytidine
  modified_base (19)..(19): um
  modified_base (20)..(20): 2'-deoxy-2'-fluorouridine
  modified_base (21)..(21): gm
  modified_base (22)..(22): 2'-deoxy-2'-fluoroguanosine
  misc_feature (22)..(23): 5'-phosphonothioate
  modified_base (23)..(23): um
aaucuuuacucucucuccuuggu

SEQ ID NO: 6612 - RNA, 23 nt, Artificial Sequence
  siRNA antisense strand against b2GPI
  modified_base (1)..(1): 2'-deoxy-2'-fluoroguanosine
  modified_base (2)..(2): 2'-O-methyladenosine
  misc_feature (2)..(3): 5'-phosphonothioate
  modified_base (3)..(3): 2'-deoxy-2'-fluoroadenosine
  modified_base (4)..(4): um
  modified_base (5)..(5): 2'-deoxy-2'-fluorocytidine
  modified_base (6)..(6): um
  modified_base (7)..(7): 2'-deoxy-2'-fluorouridine
  modified_base (8)..(8): um
  modified_base (9)..(9): 2'-deoxy-2'-fluoroadenosine
  modified_base (10)..(10): cm
  modified_base (11)..(11): um
  modified_base (12)..(12): 2'-deoxy-2'-fluorocytidine
  modified_base (13)..(13): um
  modified_base (14)..(14): 2'-deoxy-2'-fluorocytidine
  modified_base (15)..(15): um
  modified_base (16)..(16): 2'-deoxy-2'-fluorocytidine
  modified_base (17)..(17): um
  modified_base (18)..(18): 2'-deoxy-2'-fluorocytidine
  modified_base (19)..(19): cm
  modified_base (20)..(20): 2'-deoxy-2'-fluorouridine
  modified_base (21)..(21): um
  modified_base (22)..(22): 2'-deoxy-2'-fluoroguanosine
  misc_feature (22)..(23): 5'-phosphonothioate
  modified_base (23)..(23): gm
gaaucuuuacucucucuccuugg

SEQ ID NO: 6613 - RNA, 23 nt, Artificial Sequence
  siRNA antisense strand against b2GPI
  modified_base (1)..(1): 2'-deoxy-2'-fluorouridine
  modified_base (2)..(2): gm
  misc_feature (2)..(3): 5'-phosphonothioate
  modified_base (3)..(3): 2'-deoxy-2'-fluoroadenosine
  modified_base (4)..(4): 2'-O-methyladenosine
  modified_base (5)..(5): 2'-deoxy-2'-fluorouridine
  modified_base (6)..(6): cm
  modified_base (7)..(7): 2'-deoxy-2'-fluorouridine
  modified_base (8)..(8): um
  modified_base (9)..(9): 2'-deoxy-2'-fluorouridine
  modified_base (10)..(10): 2'-O-methyladenosine
  modified_base (11)..(11): cm
  modified_base (12)..(12): 2'-deoxy-2'-fluorouridine
  modified_base (13)..(13): cm
  modified_base (14)..(14): 2'-deoxy-2'-fluorouridine
  modified_base (15)..(15): cm
  modified_base (16)..(16): 2'-deoxy-2'-fluorouridine
  modified_base (17)..(17): cm
  modified_base (18)..(18): 2'-deoxy-2'-fluorouridine
  modified_base (19)..(19): cm
  modified_base (20)..(20): 2'-deoxy-2'-fluorocytidine
  modified_base (21)..(21): um
  modified_base (22)..(22): 2'-deoxy-2'-fluorouridine
  misc_feature (22)..(23): 5'-phosphonothioate
  modified_base (23)..(23): gm
ugaaucuuuacucucucuccuug

SEQ ID NO: 6614 - RNA, 23 nt, Artificial Sequence
  siRNA antisense strand against b2GPI
  modified_base (1)..(1): 2'-deoxy-2'-fluorocytidine
  modified_base (2)..(2): um
  misc_feature (2)..(3): 5'-phosphonothioate
  modified_base (3)..(3): 2'-deoxy-2'-fluoroguanosine
  modified_base (4)..(4): 2'-O-methyladenosine
  modified_base (5)..(5): 2'-deoxy-2'-fluoroadenosine
  modified_base (6)..(6): um
  modified_base (7)..(7): 2'-deoxy-2'-fluorocytidine
  modified_base (8)..(8): um
  modified_base (9)..(9): 2'-deoxy-2'-fluorouridine
  modified_base (10)..(10): um
  modified_base (11)..(11): 2'-O-methyladenosine
  modified_base (12)..(12): 2'-deoxy-2'-fluorocytidine
  modified_base (13)..(13): um
  modified_base (14)..(14): 2'-deoxy-2'-fluorocytidine
  modified_base (15)..(15): um
  modified_base (16)..(16): 2'-deoxy-2'-fluorocytidine
  modified_base (17)..(17): um
  modified_base (18)..(18): 2'-deoxy-2'-fluorocytidine
  modified_base (19)..(19): um
  modified_base (20)..(20): 2'-deoxy-2'-fluorocytidine
  modified_base (21)..(21): cm
  modified_base (22)..(22): 2'-deoxy-2'-fluorouridine
  misc_feature (22)..(23): 5'-phosphonothioate
  modified_base (23)..(23): um
cugaaucuuuacucucucuccuu

SEQ ID NO: 6615 - RNA, 23 nt, Artificial Sequence
  siRNA antisense strand against b2GPI
  modified_base (1)..(1): 2'-deoxy-2'-fluorouridine
  modified_base (2)..(2): cm
  misc_feature (2)..(3): 5'-phosphonothioate
  modified_base (3)..(3): 2'-deoxy-2'-fluorocytidine
  modified_base (4)..(4): um
  modified_base (5)..(5): 2'-deoxy-2'-fluoroguanosine
  modified_base (6)..(6): 2'-O-methyladenosine
  modified_base (7)..(7): 2'-deoxy-2'-fluoroadenosine
  modified_base (8)..(8): um
  modified_base (9)..(9): 2'-deoxy-2'-fluorocytidine
  modified_base (10)..(10): um
  modified_base (11)..(11): um
  modified_base (12)..(12): 2'-deoxy-2'-fluorouridine
  modified_base (13)..(13): 2'-O-methyladenosine
  modified_base (14)..(14): 2'-deoxy-2'-fluorocytidine
  modified_base (15)..(15): um
  modified_base (16)..(16): 2'-deoxy-2'-fluorocytidine
  modified_base (17)..(17): um
  modified_base (18)..(18): 2'-deoxy-2'-fluorocytidine
  modified_base (19)..(19): um
  modified_base (20)..(20): 2'-deoxy-2'-fluorocytidine
  modified_base (21)..(21): um
  modified_base (22)..(22): 2'-deoxy-2'-fluorocytidine
  misc_feature (22)..(23): 5'-phosphonothioate
  modified_base (23)..(23): cm
uccugaaucuuuacucucucucc

SEQ ID NO: 6616 - RNA, 23 nt, Artificial Sequence
  siRNA antisense strand against b2GPI
  modified_base (1)..(1): 2'-deoxy-2'-fluorouridine
  modified_base (2)..(2): um
  misc_feature (2)..(3): 5'-phosphonothioate
  modified_base (3)..(3): 2'-deoxy-2'-fluorocytidine
  modified_base (4)..(4): cm
  modified_base (5)..(5): 2'-deoxy-2'-fluorouridine
  modified_base (6)..(6): gm
  modified_base (7)..(7): 2'-deoxy-2'-fluoroadenosine
  modified_base (8)..(8): 2'-O-methyladenosine
  modified_base (9)..(9): 2'-deoxy-2'-fluorouridine
  modified_base (10)..(10): cm
  modified_base (11)..(11): um
  modified_base (12)..(12): 2'-deoxy-2'-fluorouridine
  modified_base (13)..(13): um
  modified_base (14)..(14): 2'-deoxy-2'-fluoroadenosine
  modified_base (15)..(15): cm
  modified_base (16)..(16): 2'-deoxy-2'-fluorouridine
  modified_base (17)..(17): cm
  modified_base (18)..(18): 2'-deoxy-2'-fluorouridine
  modified_base (19)..(19): cm
  modified_base (20)..(20): 2'-deoxy-2'-fluorouridine
  modified_base (21)..(21): cm
  modified_base (22)..(22): 2'-deoxy-2'-fluorouridine
  misc_feature (22)..(23): 5'-phosphonothioate
  modified_base (23)..(23): cm
uuccugaaucuuuacucucucuc

SEQ ID NO: 6617 - RNA, 23 nt, Artificial Sequence
  siRNA antisense strand against b2GPI
  modified_base (1)..(1): 2'-deoxy-2'-fluorouridine
  modified_base (2)..(2): um
  misc_feature (2)..(3): 5'-phosphonothioate
  modified_base (3)..(3): 2'-deoxy-2'-fluorouridine
  modified_base (4)..(4): cm
  modified_base (5)..(5): 2'-deoxy-2'-fluorocytidine
  modified_base (6)..(6): um
  modified_base (7)..(7): 2'-deoxy-2'-fluoroguanosine
  modified_base (8)..(8): 2'-O-methyladenosine
  modified_base (9)..(9): 2'-deoxy-2'-fluoroadenosine
  modified_base (10)..(10): um
  modified_base (11)..(11): cm
  modified_base (12)..(12): 2'-deoxy-2'-fluorouridine
  modified_base (13)..(13): um
  modified_base (14)..(14): 2'-deoxy-2'-fluorouridine
  modified_base (15)..(15): 2'-O-methyladenosine
  modified_base (16)..(16): 2'-deoxy-2'-fluorocytidine
  modified_base (17)..(17): um
  modified_base (18)..(18): 2'-deoxy-2'-fluorocytidine
  modified_base (19)..(19): um
  modified_base (20)..(20): 2'-deoxy-2'-fluorocytidine
  modified_base (21)..(21): um
  modified_base (22)..(22): 2'-deoxy-2'-fluorocytidine
  misc_feature (22)..(23): 5'-phosphonothioate
  modified_base (23)..(23): um
uuuccugaaucuuuacucucucu

SEQ ID NO: 6618 - RNA, 23 nt, Artificial Sequence
  siRNA antisense strand against b2GPI
  modified_base (1)..(1): 2'-deoxy-2'-fluorouridine
  modified_base (2)..(2): um
  misc_feature (2)..(3): 5'-phosphonothioate
  modified_base (3)..(3): 2'-deoxy-2'-fluorouridine
  modified_base (4)..(4): um
  modified_base (5)..(5): 2'-deoxy-2'-fluorocytidine
  modified_base (6)..(6): cm
  modified_base (7)..(7): 2'-deoxy-2'-fluorouridine
  modified_base (8)..(8): gm
  modified_base (9)..(9): 2'-deoxy-2'-fluoroadenosine
  modified_base (10)..(10): 2'-O-methyladenosine
  modified_base (11)..(11): um
  modified_base (12)..(12): 2'-deoxy-2'-fluorocytidine
  modified_base (13)..(13): um
  modified_base (14)..(14): 2'-deoxy-2'-fluorouridine
  modified_base (15)..(15): um
  modified_base (16)..(16): 2'-deoxy-2'-fluoroadenosine
  modified_base (17)..(17): cm
  modified_base (18)..(18): 2'-deoxy-2'-fluorouridine
  modified_base (19)..(19): cm
  modified_base (20)..(20): 2'-deoxy-2'-fluorouridine
  modified_base (21)..(21): cm
  modified_base (22)..(22): 2'-deoxy-2'-fluorouridine
  misc_feature (22)..(23): 5'-phosphonothioate
  modified_base (23)..(23): cm
uuuuccugaaucuuuacucucuc

SEQ ID NO: 6619 - RNA, 23 nt, Artificial Sequence
  siRNA antisense strand against b2GPI
  modified_base (1)..(1): 2'-deoxy-2'-fluorouridine
  modified_base (2)..(2): um
  misc_feature (2)..(3): 5'-phosphonothioate
  modified_base (3)..(3): 2'-deoxy-2'-fluorouridine
  modified_base (4)..(4): um
  modified_base (5)..(5): 2'-deoxy-2'-fluorouridine
  modified_base (6)..(6): cm
  modified_base (7)..(7): 2'-deoxy-2'-fluorocytidine
  modified_base (8)..(8): um
  modified_base (9)..(9): 2'-deoxy-2'-fluoroguanosine
  modified_base (10)..(10): 2'-O-methyladenosine
  modified_base (11)..(11): 2'-O-methyladenosine
  modified_base (12)..(12): 2'-deoxy-2'-fluorouridine
  modified_base (13)..(13): cm
  modified_base (14)..(14): 2'-deoxy-2'-fluorouridine
  modified_base (15)..(15): um
  modified_base (16)..(16): 2'-deoxy-2'-fluorouridine
  modified_base (17)..(17): 2'-O-methyladenosine
  modified_base (18)..(18): 2'-deoxy-2'-fluorocytidine
  modified_base (19)..(19): um
  modified_base (20)..(20): 2'-deoxy-2'-fluorocytidine
  modified_base (21)..(21): um
  modified_base (22)..(22): 2'-deoxy-2'-fluorocytidine
  misc_feature (22)..(23): 5'-phosphonothioate
  modified_base (23)..(23): um
uuuuuccugaaucuuuacucucu

SEQ ID NO: 6620 - RNA, 23 nt, Artificial Sequence
  siRNA antisense strand against b2GPI
  modified_base (1)..(1): 2'-deoxy-2'-fluoroadenosine
  modified_base (2)..(2): um
  misc_feature (2)..(3): 5'-phosphonothioate
  modified_base (3)..(3): 2'-deoxy-2'-fluorouridine
  modified_base (4)..(4): um
  modified_base (5)..(5): 2'-deoxy-2'-fluorouridine
  modified_base (6)..(6): um
  modified_base (7)..(7): 2'-deoxy-2'-fluorocytidine
  modified_base (8)..(8): cm
  modified_base (9)..(9): 2'-deoxy-2'-fluorouridine
  modified_base (10)..(10): gm
  modified_base (11)..(11): 2'-O-methyladenosine
  modified_base (12)..(12): 2'-deoxy-2'-fluoroadenosine
  modified_base (13)..(13): um
  modified_base (14)..(14): 2'-deoxy-2'-fluorocytidine
  modified_base (15)..(15): um
  modified_base (16)..(16): 2'-deoxy-2'-fluorouridine
  modified_base (17)..(17): um
  modified_base (18)..(18): 2'-deoxy-2'-fluoroadenosine
  modified_base (19)..(19): cm
  modified_base (20)..(20): 2'-deoxy-2'-fluorouridine
  modified_base (21)..(21): cm
  modified_base (22)..(22): 2'-deoxy-2'-fluorouridine
  misc_feature (22)..(23): 5'-phosphonothioate
  modified_base (23)..(23): cm
auuuuuccugaaucuuuacucuc

SEQ ID NO: 6621 - RNA, 23 nt, Artificial Sequence
  siRNA antisense strand against b2GPI
  modified_base (1)..(1): 2'-deoxy-2'-fluoroadenosine
  modified_base (2)..(2): 2'-O-methyladenosine
  misc_feature (2)..(3): 5'-phosphonothioate
  modified_base (3)..(3): 2'-deoxy-2'-fluorouridine
  modified_base (4)..(4): um
  modified_base (5)..(5): 2'-deoxy-2'-fluorouridine
  modified_base (6)..(6): um
  modified_base (7)..(7): 2'-deoxy-2'-fluorouridine
  modified_base (8)..(8): cm
  modified_base (9)..(9): 2'-deoxy-2'-fluorocytidine
  modified_base (10)..(10): um
  modified_base (11)..(11): gm
  modified_base (12)..(12): 2'-deoxy-2'-fluoroadenosine
  modified_base (13)..(13): 2'-O-methyladenosine
  modified_base (14)..(14): 2'-deoxy-2'-fluorouridine
  modified_base (15)..(15): cm
  modified_base (16)..(16): 2'-deoxy-2'-fluorouridine
  modified_base (17)..(17): um
  modified_base (18)..(18): 2'-deoxy-2'-fluorouridine
  modified_base (19)..(19): 2'-O-methyladenosine
  modified_base (20)..(20): 2'-deoxy-2'-fluorocytidine
  modified_base (21)..(21): um
  modified_base (22)..(22): 2'-deoxy-2'-fluorocytidine
  misc_feature (22)..(23): 5'-phosphonothioate
  modified_base (23)..(23): um
aauuuuuccugaaucuuuacucu

SEQ ID NO: 6622 - RNA, 23 nt, Artificial Sequence
  siRNA antisense strand against b2GPI
  modified_base (1)..(1): 2'-deoxy-2'-fluoroadenosine
  modified_base (2)..(2): 2'-O-methyladenosine
  misc_feature (2)..(3): 5'-phosphonothioate
  modified_base (3)..(3): 2'-deoxy-2'-fluoroadenosine
  modified_base (4)..(4): um
  modified_base (5)..(5): 2'-deoxy-2'-fluorouridine
  modified_base (6)..(6): um
  modified_base (7)..(7): 2'-deoxy-2'-fluorouridine
  modified_base (8)..(8): um
  modified_base (9)..(9): 2'-deoxy-2'-fluorocytidine
  modified_base (10)..(10): cm
  modified_base (11)..(11): um
  modified_base (12)..(12): 2'-deoxy-2'-fluoroguanosine
  modified_base (13)..(13): 2'-O-methyladenosine
  modified_base (14)..(14): 2'-deoxy-2'-fluoroadenosine
  modified_base (15)..(15): um
  modified_base (16)..(16): 2'-deoxy-2'-fluorocytidine
  modified_base (17)..(17): um
  modified_base (18)..(18): 2'-deoxy-2'-fluorouridine
  modified_base (19)..(19): um
  modified_base (20)..(20): 2'-deoxy-2'-fluoroadenosine
  modified_base (21)..(21): cm
  modified_base (22)..(22): 2'-deoxy-2'-fluorouridine
  misc_feature (22)..(23): 5'-phosphonothioate
  modified_base (23)..(23): cm
aaauuuuuccugaaucuuuacuc

SEQ ID NO: 6623 - RNA, 23 nt, Artificial Sequence
  siRNA antisense strand against b2GPI
  modified_base (1)..(1): 2'-deoxy-2'-fluorouridine
  modified_base (2)..(2): 2'-O-methyladenosine
  misc_feature (2)..(3): 5'-phosphonothioate
  modified_base (3)..(3): 2'-deoxy-2'-fluoroadenosine
  modified_base (4)..(4): 2'-O-methyladenosine
  modified_base (5)..(5): 2'-deoxy-2'-fluorouridine
  modified_base (6)..(6): um
  modified_base (7)..(7): 2'-deoxy-2'-fluorouridine
  modified_base (8)..(8): um
  modified_base (9)..(9): 2'-deoxy-2'-fluorouridine
  modified_base (10)..(10): cm
  modified_base (11)..(11): cm
  modified_base (12)..(12): 2'-deoxy-2'-fluorouridine
  modified_base (13)..(13): gm
  modified_base (14)..(14): 2'-deoxy-2'-fluoroadenosine
  modified_base (15)..(15): 2'-O-methyladenosine
  modified_base (16)..(16): 2'-deoxy-2'-fluorouridine
  modified_base (17)..(17): cm
  modified_base (18)..(18): 2'-deoxy-2'-fluorouridine
  modified_base (19)..(19): um
  modified_base (20)..(20): 2'-deoxy-2'-fluorouridine
  modified_base (21)..(21): 2'-O-methyladenosine
  modified_base (22)..(22): 2'-deoxy-2'-fluorocytidine
  misc_feature (22)..(23): 5'-phosphonothioate
  modified_base (23)..(23): um
uaaauuuuuccugaaucuuuacu

SEQ ID NO: 6624 - RNA, 23 nt, Artificial Sequence
  siRNA antisense strand against b2GPI
  modified_base (1)..(1): 2'-deoxy-2'-fluorouridine
  modified_base (2)..(2): um
  misc_feature (2)..(3): 5'-phosphonothioate
  modified_base (3)..(3): 2'-deoxy-2'-fluoroadenosine
  modified_base (4)..(4): 2'-O-methyladenosine
  modified_base (5)..(5): 2'-deoxy-2'-fluoroadenosine
  modified_base (6)..(6): um
  modified_base (7)..(7): 2'-deoxy-2'-fluorouridine
  modified_base (8)..(8): um
  modified_base (9)..(9): 2'-deoxy-2'-fluorouridine
  modified_base (10)..(10): um
  modified_base (11)..(11): cm
  modified_base (12)..(12): 2'-deoxy-2'-fluorocytidine
  modified_base (13)..(13): um
  modified_base (14)..(14): 2'-deoxy-2'-fluoroguanosine
  modified_base (15)..(15): 2'-O-methyladenosine
  modified_base (16)..(16): 2'-deoxy-2'-fluoroadenosine
  modified_base (17)..(17): um
  modified_base (18)..(18): 2'-deoxy-2'-fluorocytidine
  modified_base (19)..(19): um
  modified_base (20)..(20): 2'-deoxy-2'-fluorouridine
  modified_base (21)..(21): um
  modified_base (22)..(22): 2'-deoxy-2'-fluoroadenosine
  misc_feature (22)..(23): 5'-phosphonothioate
  modified_base (23)..(23): cm
uuaaauuuuuccugaaucuuuac

SEQ ID NO: 6625 - RNA, 23 nt, Artificial Sequence
  siRNA antisense strand against b2GPI
  modified_base (1)..(1): 2'-deoxy-2'-fluorocytidine
  modified_base (2)..(2): cm
  misc_feature (2)..(3): 5'-phosphonothioate
  modified_base (3)..(3): 2'-deoxy-2'-fluoroadenosine
  modified_base (4)..(4): um
  modified_base (5)..(5): 2'-deoxy-2'-fluorouridine
  modified_base (6)..(6): cm
  modified_base (7)..(7): 2'-deoxy-2'-fluorouridine
  modified_base (8)..(8): um
  modified_base (9)..(9): 2'-deoxy-2'-fluoroadenosine
  modified_base (10)..(10): 2'-O-methyladenosine
  modified_base (11)..(11): 2'-O-methyladenosine
  modified_base (12)..(12): 2'-deoxy-2'-fluorouridine
  modified_base (13)..(13): um
  modified_base (14)..(14): 2'-deoxy-2'-fluorouridine
  modified_base (15)..(15): um
  modified_base (16)..(16): 2'-deoxy-2'-fluorouridine
  modified_base (17)..(17): cm
  modified_base (18)..(18): 2'-deoxy-2'-fluorocytidine
  modified_base (19)..(19): um
  modified_base (20)..(20): 2'-deoxy-2'-fluoroguanosine
  modified_base (21)..(21): 2'-O-methyladenosine
  modified_base (22)..(22): 2'-deoxy-2'-fluoroadenosine
  misc_feature (22)..(23): 5'-phosphonothioate
  modified_base (23)..(23): um
ccauucuuaaauuuuuccugaau

SEQ ID NO: 6626 - RNA, 23 nt, Artificial Sequence
  siRNA antisense strand against b2GPI
  modified_base (1)..(1): 2'-deoxy-2'-fluorouridine
  modified_base (2)..(2): cm
  misc_feature (2)..(3): 5'-phosphonothioate
  modified_base (3)..(3): 2'-deoxy-2'-fluorocytidine
  modified_base (4)..(4): 2'-O-methyladenosine
  modified_base (5)..(5): 2'-deoxy-2'-fluorouridine
  modified_base (6)..(6): um
  modified_base (7)..(7): 2'-deoxy-2'-fluorocytidine
  modified_base (8)..(8): um
  modified_base (9)..(9): 2'-deoxy-2'-fluorouridine
  modified_base (10)..(10): 2'-O-methyladenosine
  modified_base (11)..(11): 2'-O-methyladenosine
  modified_base (12)..(12): 2'-deoxy-2'-fluoroadenosine
  modified_base (13)..(13): um
  modified_base (14)..(14): 2'-deoxy-2'-fluorouridine
  modified_base (15)..(15): um
  modified_base (16)..(16): 2'-deoxy-2'-fluorouridine
  modified_base (17)..(17): um
  modified_base (18)..(18): 2'-deoxy-2'-fluorocytidine
  modified_base (19)..(19): cm
  modified_base (20)..(20): 2'-deoxy-2'-fluorouridine
  modified_base (21)..(21): gm
  modified_base (22)..(22): 2'-deoxy-2'-fluoroadenosine
  misc_feature (22)..(23): 5'-phosphonothioate
  modified_base (23)..(23): 2'-O-methyladenosine
uccauucuuaaauuuuuccugaa

SEQ ID NO: 6627 - RNA, 23 nt, Artificial Sequence
  siRNA antisense strand against b2GPI
  modified_base (1)..(1): 2'-deoxy-2'-fluorouridine
  modified_base (2)..(2): um
  misc_feature (2)..(3): 5'-phosphonothioate
  modified_base (3)..(3): 2'-deoxy-2'-fluorocytidine
  modified_base (4)..(4): cm
  modified_base (5)..(5): 2'-deoxy-2'-fluoroadenosine
  modified_base (6)..(6): um
  modified_base (7)..(7): 2'-deoxy-2'-fluorouridine
  modified_base (8)..(8): cm
  modified_base (9)..(9): 2'-deoxy-2'-fluorouridine
  modified_base (10)..(10): um
  modified_base (11)..(11): 2'-O-methyladenosine
  modified_base (12)..(12): 2'-deoxy-2'-fluoroadenosine
  modified_base (13)..(13): 2'-O-methyladenosine
  modified_base (14)..(14): 2'-deoxy-2'-fluorouridine
  modified_base (15)..(15): um
  modified_base (16)..(16): 2'-deoxy-2'-fluorouridine
  modified_base (17)..(17): um
  modified_base (18)..(18): 2'-deoxy-2'-fluorouridine
  modified_base (19)..(19): cm
  modified_base (20)..(20): 2'-deoxy-2'-fluorocytidine
  modified_base (21)..(21): um
  modified_base (22)..(22): 2'-deoxy-2'-fluoroguanosine
  misc_feature (22)..(23): 5'-phosphonothioate
  modified_base (23)..(23): 2'-O-methyladenosine
uuccauucuuaaauuuuuccuga

SEQ ID NO: 6628 - RNA, 23 nt, Artificial Sequence
  siRNA antisense strand against b2GPI
  modified_base (1)..(1): 2'-deoxy-2'-fluorouridine
  modified_base (2)..(2): 2'-O-methyladenosine
  misc_feature (2)..(3): 5'-phosphonothioate
  modified_base (3)..(3): 2'-deoxy-2'-fluoroguanosine
  modified_base (4)..(4): cm
  modified_base (5)..(5): 2'-deoxy-2'-fluoroadenosine
  modified_base (6)..(6): um
  modified_base (7)..(7): 2'-deoxy-2'-fluorouridine
  modified_base (8)..(8): cm
  modified_base (9)..(9): 2'-deoxy-2'-fluorocytidine
  modified_base (10)..(10): 2'-O-methyladenosine
  modified_base (11)..(11): um
  modified_base (12)..(12): 2'-deoxy-2'-fluorouridine
  modified_base (13)..(13): cm
  modified_base (14)..(14): 2'-deoxy-2'-fluorouridine
  modified_base (15)..(15): um
  modified_base (16)..(16): 2'-deoxy-2'-fluoroadenosine
  modified_base (17)..(17): 2'-O-methyladenosine
  modified_base (18)..(18): 2'-deoxy-2'-fluoroadenosine
  modified_base (19)..(19): um
  modified_base (20)..(20): 2'-deoxy-2'-fluorouridine
  modified_base (21)..(21): um
  modified_base (22)..(22): 2'-deoxy-2'-fluorouridine
  misc_feature (22)..(23): 5'-phosphonothioate
  modified_base (23)..(23): um
uagcauuccauucuuaaauuuuu

SEQ ID NO: 6629 - RNA, 23 nt, Artificial Sequence
  siRNA antisense strand against b2GPI
  modified_base (1)..(1): 2'-deoxy-2'-fluorouridine
  modified_base (2)..(2): gm
  misc_feature (2)..(3): 5'-phosphonothioate
  modified_base (3)..(3): 2'-deoxy-2'-fluorouridine
  modified_base (4)..(4): 2'-O-methyladenosine
  modified_base (5)..(5): 2'-deoxy-2'-fluoroguanosine
  modified_base (6)..(6): cm
  modified_base (7)..(7): 2'-deoxy-2'-fluoroadenosine
  modified_base (8)..(8): um
  modified_base (9)..(9): 2'-deoxy-2'-fluorouridine
  modified_base (10)..(10): cm
  modified_base (11)..(11): cm
  modified_base (12)..(12): 2'-deoxy-2'-fluoroadenosine
  modified_base (13)..(13): um
  modified_base (14)..(14): 2'-deoxy-2'-fluorouridine
  modified_base (15)..(15): cm
  modified_base (16)..(16): 2'-deoxy-2'-fluorouridine
  modified_base (17)..(17): um
  modified_base (18)..(18): 2'-deoxy-2'-fluoroadenosine
  modified_base (19)..(19): 2'-O-methyladenosine
  modified_base (20)..(20): 2'-deoxy-2'-fluoroadenosine
  modified_base (21)..(21): um
  modified_base (22)..(22): 2'-deoxy-2'-fluorouridine
  misc_feature (22)..(23): 5'-phosphonothioate
  modified_base (23)..(23): um
uguagcauuccauucuuaaauuu

SEQ ID NO: 6630 - RNA, 23 nt, Artificial Sequence
  siRNA antisense strand against b2GPI
  modified_base (1)..(1): 2'-deoxy-2'-fluorocytidine
  modified_base (2)..(2): cm
  misc_feature (2)..(3): 5'-phosphonothioate
  modified_base (3)..(3): 2'-deoxy-2'-fluoroadenosine
  modified_base (4)..(4): um
  modified_base (5)..(5): 2'-deoxy-2'-fluoroguanosine
  modified_base (6)..(6): um
  modified_base (7)..(7): 2'-deoxy-2'-fluoroadenosine
  modified_base (8)..(8): gm
  modified_base (9)..(9): 2'-deoxy-2'-fluorocytidine
  modified_base (10)..(10): 2'-O-methyladenosine
  modified_base (11)..(11): um
  modified_base (12)..(12): 2'-deoxy-2'-fluorouridine
  modified_base (13)..(13): cm
  modified_base (14)..(14): 2'-deoxy-2'-fluorocytidine
  modified_base (15)..(15): 2'-O-methyladenosine
  modified_base (16)..(16): 2'-deoxy-2'-fluorouridine
  modified_base (17)..(17): um
  modified_base (18)..(18): 2'-deoxy-2'-fluorocytidine
  modified_base (19)..(19): um
  modified_base (20)..(20): 2'-deoxy-2'-fluorouridine
  modified_base (21)..(21): 2'-O-methyladenosine
  modified_base (22)..(22): 2'-deoxy-2'-fluoroadenosine
  misc_feature (22)..(23): 5'-phosphonothioate
  modified_base (23)..(23): 2'-O-methyladenosine
ccauguagcauuccauucuuaaa

SEQ ID NO: 6631 - RNA, 23 nt, Artificial Sequence
  siRNA antisense strand against b2GPI
  modified_base (1)..(1): 2'-deoxy-2'-fluoroadenosine
  modified_base (2)..(2): cm
  misc_feature (2)..(3): 5'-phosphonothioate
  modified_base (3)..(3): 2'-deoxy-2'-fluorocytidine
  modified_base (4)..(4): 2'-O-methyladenosine
  modified_base (5)..(5): 2'-deoxy-2'-fluorouridine
  modified_base (6)..(6): gm
  modified_base (7)..(7): 2'-deoxy-2'-fluorouridine
  modified_base (8)..(8): 2'-O-methyladenosine
  modified_base (9)..(9): 2'-deoxy-2'-fluoroguanosine
  modified_base (10)..(10): cm
  modified_base (11)..(11): 2'-O-methyladenosine
  modified_base (12)..(12): 2'-deoxy-2'-fluorouridine
  modified_base (13)..(13): um
  modified_base (14)..(14): 2'-deoxy-2'-fluorocytidine
  modified_base (15)..(15): cm
  modified_base (16)..(16): 2'-deoxy-2'-fluoroadenosine
  modified_base (17)..(17): um
  modified_base (18)..(18): 2'-deoxy-2'-fluorouridine
  modified_base (19)..(19): cm
  modified_base (20)..(20): 2'-deoxy-2'-fluorouridine
  modified_base (21)..(21): um
  modified_base (22)..(22): 2'-deoxy-2'-fluoroadenosine
  misc_feature (22)..(23): 5'-phosphonothioate
  modified_base (23)..(23): 2'-O-methyladenosine
accauguagcauuccauucuuaa

SEQ ID NO: 6632 - RNA, 23 nt, Artificial Sequence
  siRNA antisense strand against b2GPI
  modified_base (1)..(1): 2'-deoxy-2'-fluorocytidine
  modified_base (2)..(2): 2'-O-methyladenosine
  misc_feature (2)..(3): 5'-phosphonothioate
  modified_base (3)..(3): 2'-deoxy-2'-fluorocytidine
  modified_base (4)..(4): cm
  modified_base (5)..(5): 2'-deoxy-2'-fluoroadenosine
  modified_base (6)..(6): um
  modified_base (7)..(7): 2'-deoxy-2'-fluoroguanosine
  modified_base (8)..(8): um
  modified_base (9)..(9): 2'-deoxy-2'-fluoroadenosine
  modified_base (10)..(10): gm
  modified_base (11)..(11): cm
  modified_base (12)..(12): 2'-deoxy-2'-fluoroadenosine
  modified_base (13)..(13): um
  modified_base (14)..(14): 2'-deoxy-2'-fluorouridine
  modified_base (15)..(15): cm
  modified_base (16)..(16): 2'-deoxy-2'-fluorocytidine
  modified_base (17)..(17): 2'-O-methyladenosine
  modified_base (18)..(18): 2'-deoxy-2'-fluorouridine
  modified_base (19)..(19): um
  modified_base (20)..(20): 2'-deoxy-2'-fluorocytidine
  modified_base (21)..(21): um
  modified_base (22)..(22): 2'-deoxy-2'-fluorouridine
  misc_feature (22)..(23): 5'-phosphonothioate
  modified_base (23)..(23): 2'-O-methyladenosine
caccauguagcauuccauucuua

SEQ ID NO: 6633 - RNA, 23 nt, Artificial Sequence
  siRNA antisense strand against b2GPI
  modified_base (1)..(1): 2'-deoxy-2'-fluorouridine
  modified_base (2)..(2): cm
  misc_feature (2)..(3): 5'-phosphonothioate
  modified_base (3)..(3): 2'-deoxy-2'-fluoroadenosine
  modified_base (4)..(4): cm
  modified_base (5)..(5): 2'-deoxy-2'-fluorocytidine
  modified_base (6)..(6): 2'-O-methyladenosine
  modified_base (7)..(7): 2'-deoxy-2'-fluorouridine
  modified_base (8)..(8): gm
  modified_base (9)..(9): 2'-deoxy-2'-fluorouridine
  modified_base (10)..(10): 2'-O-methyladenosine
  modified_base (11)..(11): gm
  modified_base (12)..(12): 2'-deoxy-2'-fluorocytidine
  modified_base (13)..(13): 2'-O-methyladenosine
  modified_base (14)..(14): 2'-deoxy-2'-fluorouridine
  modified_base (15)..(15): um
  modified_base (16)..(16): 2'-deoxy-2'-fluorocytidine
  modified_base (17)..(17): cm
  modified_base (18)..(18): 2'-deoxy-2'-fluoroadenosine
  modified_base (19)..(19): um
  modified_base (20)..(20): 2'-deoxy-2'-fluorouridine
  modified_base (21)..(21): cm
  modified_base (22)..(22): 2'-deoxy-2'-fluorouridine
  misc_feature (22)..(23): 5'-phosphonothioate
  modified_base (23)..(23): um
ucaccauguagcauuccauucuu

SEQ ID NO: 6634 - RNA, 23 nt, Artificial Sequence
  siRNA antisense strand against b2GPI
  modified_base (1)..(1): 2'-deoxy-2'-fluoroadenosine
  modified_base (2)..(2): um
  misc_feature (2)..(3): 5'-phosphonothioate
  modified_base (3)..(3): 2'-deoxy-2'-fluorocytidine
  modified_base (4)..(4): 2'-O-methyladenosine
  modified_base (5)..(5): 2'-deoxy-2'-fluorocytidine
  modified_base (6)..(6): cm
  modified_base (7)..(7): 2'-deoxy-2'-fluoroadenosine
  modified_base (8)..(8): um
  modified_base (9)..(9): 2'-deoxy-2'-fluoroguanosine
  modified_base (10)..(10): um
  modified_base (11)..(11): 2'-O-methyladenosine
  modified_base (12)..(12): 2'-deoxy-2'-fluoroguanosine
  modified_base (13)..(13): cm
  modified_base (14)..(14): 2'-deoxy-2'-fluoroadenosine
  modified_base (15)..(15): um
  modified_base (16)..(16): 2'-deoxy-2'-fluorouridine
  modified_base (17)..(17): cm
  modified_base (18)..(18): 2'-deoxy-2'-fluorocytidine
  modified_base (19)..(19): 2'-O-methyladenosine
  modified_base (20)..(20): 2'-deoxy-2'-fluorouridine
  modified_base (21)..(21): um
  modified_base (22)..(22): 2'-deoxy-2'-fluorocytidine
  misc_feature (22)..(23): 5'-phosphonothioate
  modified_base (23)..(23): um
aucaccauguagcauuccauucu

SEQ ID NO: 6635 - RNA, 23 nt, Artificial Sequence
  siRNA antisense strand against b2GPI
  modified_base (1)..(1): 2'-deoxy-2'-fluorouridine
  modified_base (2)..(2): 2'-O-methyladenosine
  misc_feature (2)..(3): 5'-phosphonothioate
  modified_base (3)..(3): 2'-deoxy-2'-fluorouridine
  modified_base (4)..(4): cm
  modified_base (5)..(5): 2'-deoxy-2'-fluoroadenosine
  modified_base (6)..(6): cm
  modified_base (7)..(7): 2'-deoxy-2'-fluorocytidine
  modified_base (8)..(8): 2'-O-methyladenosine
  modified_base (9)..(9): 2'-deoxy-2'-fluorouridine
  modified_base (10)..(10): gm
  modified_base (11)..(11): um
  modified_base (12)..(12): 2'-deoxy-2'-fluoroadenosine
  modified_base (13)..(13): gm
  modified_base (14)..(14): 2'-deoxy-2'-fluorocytidine
  modified_base (15)..(15): 2'-O-methyladenosine
  modified_base (16)..(16): 2'-deoxy-2'-fluorouridine
  modified_base (17)..(17): um
  modified_base (18)..(18): 2'-deoxy-2'-fluorocytidine
  modified_base (19)..(19): cm
  modified_base (20)..(20): 2'-deoxy-2'-fluoroadenosine
  modified_base (21)..(21): um
  modified_base (22)..(22): 2'-deoxy-2'-fluorouridine
  misc_feature (22)..(23): 5'-phosphonothioate
  modified_base (23)..(23): cm
uaucaccauguagcauuccauuc

SEQ ID NO: 6636 - RNA, 23 nt, Artificial Sequence
  siRNA antisense strand against b2GPI
  modified_base (1)..(1): 2'-deoxy-2'-fluorouridine
  modified_base (2)..(2): um
  misc_feature (2)..(3): 5'-phosphonothioate
  modified_base (3)..(3): 2'-deoxy-2'-fluoroadenosine
  modified_base (4)..(4): um
  modified_base (5)..(5): 2'-deoxy-2'-fluorocytidine
  modified_base (6)..(6): 2'-O-methyladenosine
  modified_base (7)..(7): 2'-deoxy-2'-fluorocytidine
  modified_base (8)..(8): cm
  modified_base (9)..(9): 2'-deoxy-2'-fluoroadenosine
  modified_base (10)..(10): um
  modified_base (11)..(11): gm
  modified_base (12)..(12): 2'-deoxy-2'-fluorouridine
  modified_base (13)..(13): 2'-O-methyladenosine
  modified_base (14)..(14): 2'-deoxy-2'-fluoroguanosine
  modified_base (15)..(15): cm
  modified_base (16)..(16): 2'-deoxy-2'-fluoroadenosine
  modified_base (17)..(17): um
  modified_base (18)..(18): 2'-deoxy-2'-fluorouridine
  modified_base (19)..(19): cm
  modified_base (20)..(20): 2'-deoxy-2'-fluorocytidine
  modified_base (21)..(21): 2'-O-methyladenosine
  modified_base (22)..(22): 2'-deoxy-2'-fluorouridine
  misc_feature (22)..(23): 5'-phosphonothioate
  modified_base (23)..(23): um
uuaucaccauguagcauuccauu

SEQ ID NO: 6637 - RNA, 23 nt, Artificial Sequence
  siRNA antisense strand against b2GPI
  modified_base (1)..(1): 2'-deoxy-2'-fluorouridine
  modified_base (2)..(2): um
  misc_feature (2)..(3): 5'-phosphonothioate
  modified_base (3)..(3): 2'-deoxy-2'-fluorouridine
  modified_base (4)..(4): 2'-O-methyladenosine
  modified_base (5)..(5): 2'-deoxy-2'-fluorouridine
  modified_base (6)..(6): cm
  modified_base (7)..(7): 2'-deoxy-2'-fluoroadenosine
  modified_base (8)..(8): cm
  modified_base (9)..(9): 2'-deoxy-2'-fluorocytidine
  modified_base (10)..(10): 2'-O-methyladenosine
  modified_base (11)..(11): um
  modified_base (12)..(12): 2'-deoxy-2'-fluoroguanosine
  modified_base (13)..(13): um
  modified_base (14)..(14): 2'-deoxy-2'-fluoroadenosine
  modified_base (15)..(15): gm
  modified_base (16)..(16): 2'-deoxy-2'-fluorocytidine
  modified_base (17)..(17): 2'-O-methyladenosine
  modified_base (18)..(18): 2'-deoxy-2'-fluorouridine
  modified_base (19)..(19): um
  modified_base (20)..(20): 2'-deoxy-2'-fluorocytidine
  modified_base (21)..(21): cm
  modified_base (22)..(22): 2'-deoxy-2'-fluoroadenosine
  misc_feature (22)..(23): 5'-phosphonothioate
  modified_base (23)..(23): um
uuuaucaccauguagcauuccau

SEQ ID NO: 6638 - RNA, 23 nt, Artificial Sequence
  siRNA antisense strand against b2GPI
  modified_base (1)..(1): 2'-deoxy-2'-fluoroadenosine
  modified_base (2)..(2): cm
  misc_feature (2)..(3): 5'-phosphonothioate
  modified_base (3)..(3): 2'-deoxy-2'-fluorouridine
  modified_base (4)..(4): um
  modified_base (5)..(5): 2'-deoxy-2'-fluorouridine
  modified_base (6)..(6): 2'-O-methyladenosine
  modified_base (7)..(7): 2'-deoxy-2'-fluorouridine
  modified_base (8)..(8): cm
  modified_base (9)..(9): 2'-deoxy-2'-fluoroadenosine
  modified_base (10)..(10): cm
  modified_base (11)..(11): cm
  modified_base (12)..(12): 2'-deoxy-2'-fluoroadenosine
  modified_base (13)..(13): um
  modified_base (14)..(14): 2'-deoxy-2'-fluoroguanosine
  modified_base (15)..(15): um
  modified_base (16)..(16): 2'-deoxy-2'-fluoroadenosine
  modified_base (17)..(17): gm
  modified_base (18)..(18): 2'-deoxy-2'-fluorocytidine
  modified_base (19)..(19): 2'-O-methyladenosine
  modified_base (20)..(20): 2'-deoxy-2'-fluorouridine
  modified_base (21)..(21): um
  modified_base (22)..(22): 2'-deoxy-2'-fluorocytidine
  misc_feature (22)..(23): 5'-phosphonothioate
  modified_base (23)..(23): cm
acuuuaucaccauguagcauucc

SEQ ID NO: 6639 - RNA, 23 nt, Artificial Sequence
  siRNA antisense strand against b2GPI
  modified_base (1)..(1): 2'-deoxy-2'-fluoroadenosine
  modified_base (2)..(2): 2'-O-methyladenosine
  misc_feature (2)..(3): 5'-phosphonothioate
  modified_base (3)..(3): 2'-deoxy-2'-fluorocytidine
  modified_base (4)..(4): um
  modified_base (5)..(5): 2'-deoxy-2'-fluorouridine
  modified_base (6)..(6): um
  modified_base (7)..(7): 2'-deoxy-2'-fluoroadenosine
  modified_base (8)..(8): um
  modified_base (9)..(9): 2'-deoxy-2'-fluorocytidine
  modified_base (10)..(10): 2'-O-methyladenosine
  modified_base (11)..(11): cm
  modified_base (12)..(12): 2'-deoxy-2'-fluorocytidine
  modified_base (13)..(13): 2'-O-methyladenosine
  modified_base (14)..(14): 2'-deoxy-2'-fluorouridine
  modified_base (15)..(15): gm
  modified_base (16)..(16): 2'-deoxy-2'-fluorouridine
  modified_base (17)..(17): 2'-O-methyladenosine
  modified_base (18)..(18): 2'-deoxy-2'-fluoroguanosine
  modified_base (19)..(19): cm
  modified_base (20)..(20): 2'-deoxy-2'-fluoroadenosine
  modified_base (21)..(21): um
  modified_base (22)..(22): 2'-deoxy-2'-fluorouridine
  misc_feature (22)..(23): 5'-phosphonothioate
  modified_base (23)..(23): cm
aacuuuaucaccauguagcauuc

SEQ ID NO: 6640 - RNA, 23 nt, Artificial Sequence
  siRNA antisense strand against b2GPI
  modified_base (1)..(1): 2'-deoxy-2'-fluoroadenosine
  modified_base (2)..(2): 2'-O-methyladenosine
  misc_feature (2)..(3): 5'-phosphonothioate
  modified_base (3)..(3): 2'-deoxy-2'-fluoroadenosine
  modified_base (4)..(4): cm
  modified_base (5)..(5): 2'-deoxy-2'-fluorouridine
  modified_base (6)..(6): um
  modified_base (7)..(7): 2'-deoxy-2'-fluorouridine
  modified_base (8)..(8): 2'-O-methyladenosine
  modified_base (9)..(9): 2'-deoxy-2'-fluorouridine
  modified_base (10)..(10): cm
  modified_base (11)..(11): 2'-O-methyladenosine
  modified_base (12)..(12): 2'-deoxy-2'-fluorocytidine
  modified_base (13)..(13): cm
  modified_base (14)..(14): 2'-deoxy-2'-fluoroadenosine
  modified_base (15)..(15): um
  modified_base (16)..(16): 2'-deoxy-2'-fluoroguanosine
  modified_base (17)..(17): um
  modified_base (18)..(18): 2'-deoxy-2'-fluoroadenosine
  modified_base (19)..(19): gm
  modified_base (20)..(20): 2'-deoxy-2'-fluorocytidine
  modified_base (21)..(21): 2'-O-methyladenosine
  modified_base (22)..(22): 2'-deoxy-2'-fluorouridine
  misc_feature (22)..(23): 5'-phosphonothioate
  modified_base (23)..(23): um
aaacuuuaucaccauguagcauu

SEQ ID NO: 6641 - RNA, 23 nt, Artificial Sequence
  siRNA antisense strand against b2GPI
  modified_base (1)..(1): 2'-deoxy-2'-fluoroadenosine
  modified_base (2)..(2): gm
  misc_feature (2)..(3): 5'-phosphonothioate
  modified_base (3)..(3): 2'-deoxy-2'-fluoroadenosine
  modified_base (4)..(4): 2'-O-methyladenosine
  modified_base (5)..(5): 2'-deoxy-2'-fluoroadenosine
  modified_base (6)..(6): cm
  modified_base (7)..(7): 2'-deoxy-2'-fluorouridine
  modified_base (8)..(8): um
  modified_base (9)..(9): 2'-deoxy-2'-fluorouridine
  modified_base (10)..(10): 2'-O-methyladenosine
  modified_base (11)..(11): um
  modified_base (12)..(12): 2'-deoxy-2'-fluorocytidine
  modified_base (13)..(13): 2'-O-methyladenosine
  modified_base (14)..(14): 2'-deoxy-2'-fluorocytidine
  modified_base (15)..(15): cm
  modified_base (16)..(16): 2'-deoxy-2'-fluoroadenosine
  modified_base (17)..(17): um
  modified_base (18)..(18): 2'-deoxy-2'-fluoroguanosine
  modified_base (19)..(19): um
  modified_base (20)..(20): 2'-deoxy-2'-fluoroadenosine
  modified_base (21)..(21): gm
  modified_base (22)..(22): 2'-deoxy-2'-fluorocytidine
  misc_feature (22)..(23): 5'-phosphonothioate
  modified_base (23)..(23): 2'-O-methyladenosine
agaaacuuuaucaccauguagca

SEQ ID NO: 6642 - RNA, 23 nt, Artificial Sequence
  siRNA antisense strand against b2GPI
  modified_base (1)..(1): 2'-deoxy-2'-fluoroadenosine
  modified_base (2)..(2): 2'-O-methyladenosine
  misc_feature (2)..(3): 5'-phosphonothioate
  modified_base (3)..(3): 2'-deoxy-2'-fluoroadenosine
  modified_base (4)..(4): gm
  modified_base (5)..(5): 2'-deoxy-2'-fluoroadenosine
  modified_base (6)..(6): 2'-O-methyladenosine
  modified_base (7)..(7): 2'-deoxy-2'-fluoroadenosine
  modified_base (8)..(8): cm
  modified_base (9)..(9): 2'-deoxy-2'-fluorouridine
  modified_base (10)..(10): um
  modified_base (11)..(11): um
  modified_base (12)..(12): 2'-deoxy-2'-fluoroadenosine
  modified_base (13)..(13): um
  modified_base (14)..(14): 2'-deoxy-2'-fluorocytidine
  modified_base (15)..(15): 2'-O-methyladenosine
  modified_base (16)..(16): 2'-deoxy-2'-fluorocytidine
  modified_base (17)..(17): cm
  modified_base (18)..(18): 2'-deoxy-2'-fluoroadenosine
  modified_base (19)..(19): um
  modified_base (20)..(20): 2'-deoxy-2'-fluoroguanosine
  modified_base (21)..(21): um
  modified_base (22)..(22): 2'-deoxy-2'-fluoroadenosine
  misc_feature (22)..(23): 5'-phosphonothioate
  modified_base (23)..(23): gm
aaagaaacuuuaucaccauguag

SEQ ID NO: 6643 - RNA, 23 nt, Artificial Sequence
  siRNA antisense strand against b2GPI
  modified_base (1)..(1): 2'-deoxy-2'-fluoroadenosine
  modified_base (2)..(2): gm
  misc_feature (2)..(3): 5'-phosphonothioate
  modified_base (3)..(3): 2'-deoxy-2'-fluoroadenosine
  modified_base (4)..(4): 2'-O-methyladenosine
  modified_base (5)..(5): 2'-deoxy-2'-fluoroadenosine
  modified_base (6)..(6): gm
  modified_base (7)..(7): 2'-deoxy-2'-fluoroadenosine
  modified_base (8)..(8): 2'-O-methyladenosine
  modified_base (9)..(9): 2'-deoxy-2'-fluoroadenosine
  modified_base (10)..(10): cm
  modified_base (11)..(11): um
  modified_base (12)..(12): 2'-deoxy-2'-fluorouridine
  modified_base (13)..(13): um
  modified_base (14)..(14): 2'-deoxy-2'-fluoroadenosine
  modified_base (15)..(15): um
  modified_base (16)..(16): 2'-deoxy-2'-fluorocytidine
  modified_base (17)..(17): 2'-O-methyladenosine
  modified_base (18)..(18): 2'-deoxy-2'-fluorocytidine
  modified_base (19)..(19): cm
  modified_base (20)..(20): 2'-deoxy-2'-fluoroadenosine
  modified_base (21)..(21): um
  modified_base (22)..(22): 2'-deoxy-2'-fluoroguanosine
  misc_feature (22)..(23): 5'-phosphonothioate
  modified_base (23)..(23): um
agaaagaaacuuuaucaccaugu

SEQ ID NO: 6644 - RNA, 23 nt, Artificial Sequence
  siRNA antisense strand against b2GPI
  modified_base (1)..(1): 2'-deoxy-2'-fluoroadenosine
  modified_base (2)..(2): 2'-O-methyladenosine
  misc_feature (2)..(3): 5'-phosphonothioate
  modified_base (3)..(3): 2'-deoxy-2'-fluoroguanosine
  modified_base (4)..(4): 2'-O-methyladenosine
  modified_base (5)..(5): 2'-deoxy-2'-fluoroadenosine
  modified_base (6)..(6): 2'-O-methyladenosine
  modified_base (7)..(7): 2'-deoxy-2'-fluoroguanosine
  modified_base (8)..(8): 2'-O-methyladenosine
  modified_base (9)..(9): 2'-deoxy-2'-fluoroadenosine
  modified_base (10)..(10): 2'-O-methyladenosine
  modified_base (11)..(11): cm
  modified_base (12)..(12): 2'-deoxy-2'-fluorouridine
  modified_base (13)..(13): um
  modified_base (14)..(14): 2'-deoxy-2'-fluorouridine
  modified_base (15)..(15): 2'-O-methyladenosine
  modified_base (16)..(16): 2'-deoxy-2'-fluorouridine
  modified_base (17)..(17): cm
  modified_base (18)..(18): 2'-deoxy-2'-fluoroadenosine
  modified_base (19)..(19): cm
  modified_base (20)..(20): 2'-deoxy-2'-fluorocytidine
  modified_base (21)..(21): 2'-O-methyladenosine
  modified_base (22)..(22): 2'-deoxy-2'-fluorouridine
  misc_feature (22)..(23): 5'-phosphonothioate
  modified_base (23)..(23): gm
aagaaagaaacuuuaucaccaug

SEQ ID NO: 6645 - RNA, 23 nt, Artificial Sequence
  siRNA antisense strand against b2GPI
  modified_base (1)..(1): 2'-deoxy-2'-fluoroguanosine
  modified_base (2)..(2): 2'-O-methyladenosine
  misc_feature (2)..(3): 5'-phosphonothioate
  modified_base (3)..(3): 2'-deoxy-2'-fluoroadenosine
  modified_base (4)..(4): gm
  modified_base (5)..(5): 2'-deoxy-2'-fluoroadenosine
  modified_base (6)..(6): 2'-O-methyladenosine
  modified_base (7)..(7): 2'-deoxy-2'-fluoroadenosine
  modified_base (8)..(8): gm
  modified_base (9)..(9): 2'-deoxy-2'-fluoroadenosine
  modified_base (10)..(10): 2'-O-methyladenosine
  modified_base (11)..(11): 2'-O-methyladenosine
  modified_base (12)..(12): 2'-deoxy-2'-fluorocytidine
  modified_base (13)..(13): um
  modified_base (14)..(14): 2'-deoxy-2'-fluorouridine
  modified_base (15)..(15): um
  modified_base (16)..(16): 2'-deoxy-2'-fluoroadenosine
  modified_base (17)..(17): um
  modified_base (18)..(18): 2'-deoxy-2'-fluorocytidine
  modified_base (19)..(19): 2'-O-methyladenosine
  modified_base (20)..(20): 2'-deoxy-2'-fluorocytidine
  modified_base (21)..(21): cm
  modified_base (22)..(22): 2'-deoxy-2'-fluoroadenosine
  misc_feature (22)..(23): 5'-phosphonothioate
  modified_base (23)..(23): um
gaagaaagaaacuuuaucaccau

SEQ ID NO: 6646 - RNA, 23 nt, Artificial Sequence
  siRNA antisense strand against b2GPI
  modified_base (1)..(1): 2'-deoxy-2'-fluoroadenosine
  modified_base (2)..(2): gm
  misc_feature (2)..(3): 5'-phosphonothioate
  modified_base (3)..(3): 2'-deoxy-2'-fluoroadenosine
  modified_base (4)..(4): 2'-O-methyladenosine
  modified_base (5)..(5): 2'-deoxy-2'-fluoroguanosine
  modified_base (6)..(6): 2'-O-methyladenosine
  modified_base (7)..(7): 2'-deoxy-2'-fluoroadenosine
  modified_base (8)..(8): 2'-O-methyladenosine
  modified_base (9)..(9): 2'-deoxy-2'-fluoroguanosine
  modified_base (10)..(10): 2'-O-methyladenosine
  modified_base (11)..(11): 2'-O-methyladenosine
  modified_base (12)..(12): 2'-deoxy-2'-fluoroadenosine
  modified_base (13)..(13): cm
  modified_base (14)..(14): 2'-deoxy-2'-fluorouridine
  modified_base (15)..(15): um
  modified_base (16)..(16): 2'-deoxy-2'-fluorouridine
  modified_base (17)..(17): 2'-O-methyladenosine
  modified_base (18)..(18): 2'-deoxy-2'-fluorouridine
  modified_base (19)..(19): cm
  modified_base (20)..(20): 2'-deoxy-2'-fluoroadenosine
  modified_base (21)..(21): cm
  modified_base (22)..(22): 2'-deoxy-2'-fluorocytidine
  misc_feature (22)..(23): 5'-phosphonothioate
  modified_base (23)..(23): 2'-O-methyladenosine
agaagaaagaaacuuuaucacca

SEQ ID NO: 6647 - RNA, 23 nt, Artificial Sequence
  siRNA antisense strand against b2GPI
  modified_base (1)..(1): 2'-deoxy-2'-fluorouridine
  modified_base (2)..(2): gm
  misc_feature (2)..(3): 5'-phosphonothioate
  modified_base (3)..(3): 2'-deoxy-2'-fluorocytidine
  modified_base (4)..(4): 2'-O-methyladenosine
  modified_base (5)..(5): 2'-deoxy-2'-fluoroguanosine
  modified_base (6)..(6): 2'-O-methyladenosine
  modified_base (7)..(7): 2'-deoxy-2'-fluoroadenosine
  modified_base (8)..(8): gm
  modified_base (9)..(9): 2'-deoxy-2'-fluoroadenosine
  modified_base (10)..(10): 2'-O-methyladenosine
  modified_base (11)..(11): 2'-O-methyladenosine
  modified_base (12)..(12): 2'-deoxy-2'-fluoroguanosine
  modified_base (13)..(13): 2'-O-methyladenosine
  modified_base (14)..(14): 2'-deoxy-2'-fluoroadenosine
  modified_base (15)..(15): 2'-O-methyladenosine
  modified_base (16)..(16): 2'-deoxy-2'-fluorocytidine
  modified_base (17)..(17): um
  modified_base (18)..(18): 2'-deoxy-2'-fluorouridine
  modified_base (19)..(19): um
  modified_base (20)..(20): 2'-deoxy-2'-fluoroadenosine
  modified_base (21)..(21): um
  modified_base (22)..(22): 2'-deoxy-2'-fluorocytidine
  misc_feature (22)..(23): 5'-phosphonothioate
  modified_base (23)..(23): 2'-O-methyladenosine
ugcagaagaaagaaacuuuauca

SEQ ID NO: 6648 - RNA, 23 nt, Artificial Sequence
  siRNA antisense strand against b2GPI
  modified_base (1)..(1): 2'-deoxy-2'-fluorouridine
  modified_base (2)..(2): um
  misc_feature (2)..(3): 5'-phosphonothioate
  modified_base (3)..(3): 2'-deoxy-2'-fluoroguanosine
  modified_base (4)..(4): cm
  modified_base (5)..(5): 2'-deoxy-2'-fluoroadenosine
  modified_base (6)..(6): gm
  modified_base (7)..(7): 2'-deoxy-2'-fluoroadenosine
  modified_base (8)..(8): 2'-O-methyladenosine
  modified_base (9)..(9): 2'-deoxy-2'-fluoroguanosine
  modified_base (10)..(10): 2'-O-methyladenosine
  modified_base (11)..(11): 2'-O-methyladenosine
  modified_base (12)..(12): 2'-deoxy-2'-fluoroadenosine
  modified_base (13)..(13): gm
  modified_base (14)..(14): 2'-deoxy-2'-fluoroadenosine
  modified_base (15)..(15): 2'-O-methyladenosine
  modified_base (16)..(16): 2'-deoxy-2'-fluoroadenosine
  modified_base (17)..(17): cm
  modified_base (18)..(18): 2'-deoxy-2'-fluorouridine
  modified_base (19)..(19): um
  modified_base (20)..(20): 2'-deoxy-2'-fluorouridine
  modified_base (21)..(21): 2'-O-methyladenosine
  modified_base (22)..(22): 2'-deoxy-2'-fluorouridine
  misc_feature (22)..(23): 5'-phosphonothioate
  modified_base (23)..(23): cm
uugcagaagaaagaaacuuuauc

SEQ ID NO: 6649 - RNA, 23 nt, Artificial Sequence
  siRNA antisense strand against b2GPI
  modified_base (1)..(1): 2'-deoxy-2'-fluorouridine
  modified_base (2)..(2): um
  misc_feature (2)..(3): 5'-phosphonothioate
  modified_base (3)..(3): 2'-deoxy-2'-fluorouridine
  modified_base (4)..(4): gm
  modified_base (5)..(5): 2'-deoxy-2'-fluorocytidine
  modified_base (6)..(6): 2'-O-methyladenosine
  modified_base (7)..(7): 2'-deoxy-2'-fluoroguanosine
  modified_base (8)..(8): 2'-O-methyladenosine
  modified_base (9)..(9): 2'-deoxy-2'-fluoroadenosine
  modified_base (10)..(10): gm
  modified_base (11)..(11): 2'-O-methyladenosine
  modified_base (12)..(12): 2'-deoxy-2'-fluoroadenosine
  modified_base (13)..(13): 2'-O-methyladenosine
  modified_base (14)..(14): 2'-deoxy-2'-fluoroguanosine
  modified_base (15)..(15): 2'-O-methyladenosine
  modified_base (16)..(16): 2'-deoxy-2'-fluoroadenosine
  modified_base (17)..(17): 2'-O-methyladenosine
  modified_base (18)..(18): 2'-deoxy-2'-fluorocytidine
  modified_base (19)..(19): um
  modified_base (20)..(20): 2'-deoxy-2'-fluorouridine
  modified_base (21)..(21): um
  modified_base (22)..(22): 2'-deoxy-2'-fluoroadenosine
  misc_feature (22)..(23): 5'-phosphonothioate
  modified_base (23)..(23): um
uuugcagaagaaagaaacuuuau

SEQ ID NO: 6650 - RNA, 23 nt, Artificial Sequence
  siRNA antisense strand against b2GPI
  modified_base (1)..(1): 2'-deoxy-2'-fluorouridine
  modified_base (2)..(2): um
  misc_feature (2)..(3): 5'-phosphonothioate
  modified_base (3)..(3): 2'-deoxy-2'-fluorouridine
  modified_base (4)..(4): um
  modified_base (5)..(5): 2'-deoxy-2'-fluoroguanosine
  modified_base (6)..(6): cm
  modified_base (7)..(7): 2'-deoxy-2'-fluoroadenosine
  modified_base (8)..(8): gm
  modified_base (9)..(9): 2'-deoxy-2'-fluoroadenosine
  modified_base (10)..(10): 2'-O-methyladenosine
  modified_base (11)..(11): gm
  modified_base (12)..(12): 2'-deoxy-2'-fluoroadenosine
  modified_base (13)..(13): 2'-O-methyladenosine
  modified_base (14)..(14): 2'-deoxy-2'-fluoroadenosine
  modified_base (15)..(15): gm
  modified_base (16)..(16): 2'-deoxy-2'-fluoroadenosine
  modified_base (17)..(17): 2'-O-methyladenosine
  modified_base (18)..(18): 2'-deoxy-2'-fluoroadenosine
  modified_base (19)..(19): cm
  modified_base (20)..(20): 2'-deoxy-2'-fluorouridine
  modified_base (21)..(21): um
  modified_base (22)..(22): 2'-deoxy-2'-fluorouridine
  misc_feature (22)..(23): 5'-phosphonothioate
  modified_base (23)..(23): 2'-O-methyladenosine
uuuugcagaagaaagaaacuuua

SEQ ID NO: 6651 - RNA, 23 nt, Artificial Sequence
  siRNA antisense strand against b2GPI
  modified_base (1)..(1): 2'-deoxy-2'-fluorouridine
  modified_base (2)..(2): um
  misc_feature (2)..(3): 5'-phosphonothioate
  modified_base (3)..(3): 2'-deoxy-2'-fluorouridine
  modified_base (4)..(4): um
  modified_base (5)..(5): 2'-deoxy-2'-fluorouridine
  modified_base (6)..(6): gm
  modified_base (7)..(7): 2'-deoxy-2'-fluorocytidine
  modified_base (8)..(8): 2'-O-methyladenosine
  modified_base (9)..(9): 2'-deoxy-2'-fluoroguanosine
  modified_base (10)..(10): 2'-O-methyladenosine
  modified_base (11)..(11): 2'-O-methyladenosine
  modified_base (12)..(12): 2'-deoxy-2'-fluoroguanosine
  modified_base (13)..(13): 2'-O-methyladenosine
  modified_base (14)..(14): 2'-deoxy-2'-fluoroadenosine
  modified_base (15)..(15): 2'-O-methyladenosine
  modified_base (16)..(16): 2'-deoxy-2'-fluoroguanosine
  modified_base (17)..(17): 2'-O-methyladenosine
  modified_base (18)..(18): 2'-deoxy-2'-fluoroadenosine
  modified_base (19)..(19): 2'-O-methyladenosine
  modified_base (20)..(20): 2'-deoxy-2'-fluorocytidine
  modified_base (21)..(21): um
  modified_base (22)..(22): 2'-deoxy-2'-fluorouridine
  misc_feature (22)..(23): 5'-phosphonothioate
  modified_base (23)..(23): um
uuuuugcagaagaaagaaacuuu

SEQ ID NO: 6652 - RNA, 23 nt, Artificial Sequence
  siRNA antisense strand against b2GPI
  modified_base (1)..(1): 2'-deoxy-2'-fluoroadenosine
  modified_base (2)..(2): um
  misc_feature (2)..(3): 5'-phosphonothioate
  modified_base (3)..(3): 2'-deoxy-2'-fluorouridine
  modified_base (4)..(4): um
  modified_base (5)..(5): 2'-deoxy-2'-fluorouridine
  modified_base (6)..(6): um
  modified_base (7)..(7): 2'-deoxy-2'-fluoroguanosine
  modified_base (8)..(8): cm
  modified_base (9)..(9): 2'-deoxy-2'-fluoroadenosine
  modified_base (10)..(10): gm
  modified_base (11)..(11): 2'-O-methyladenosine
  modified_base (12)..(12): 2'-deoxy-2'-fluoroadenosine
  modified_base (13)..(13): gm
  modified_base (14)..(14): 2'-deoxy-2'-fluoroadenosine
  modified_base (15)..(15): 2'-O-methyladenosine
  modified_base (16)..(16): 2'-deoxy-2'-fluoroadenosine
  modified_base (17)..(17): gm
  modified_base (18)..(18): 2'-deoxy-2'-fluoroadenosine
  modified_base (19)..(19): 2'-O-methyladenosine
  modified_base (20)..(20): 2'-deoxy-2'-fluoroadenosine
  modified_base (21)..(21): cm
  modified_base (22)..(22): 2'-deoxy-2'-fluorouridine
  misc_feature (22)..(23): 5'-phosphonothioate
  modified_base (23)..(23): um
auuuuugcagaagaaagaaacuu

SEQ ID NO: 6653 - RNA, 23 nt, Artificial Sequence
  siRNA antisense strand against b2GPI
  modified_base (1)..(1): 2'-deoxy-2'-fluorouridine
  modified_base (2)..(2): 2'-O-methyladenosine
  misc_feature (2)..(3): 5'-phosphonothioate
  modified_base (3)..(3): 2'-deoxy-2'-fluorouridine
  modified_base (4)..(4): um
  modified_base (5)..(5): 2'-deoxy-2'-fluorouridine
  modified_base (6)..(6): um
  modified_base (7)..(7): 2'-deoxy-2'-fluorouridine
  modified_base (8)..(8): gm
  modified_base (9)..(9): 2'-deoxy-2'-fluorocytidine
  modified_base (10)..(10): 2'-O-methyladenosine
  modified_base (11)..(11): gm
  modified_base (12)..(12): 2'-deoxy-2'-fluoroadenosine
  modified_base (13)..(13): 2'-O-methyladenosine
  modified_base (14)..(14): 2'-deoxy-2'-fluoroguanosine
  modified_base (15)..(15): 2'-O-methyladenosine
  modified_base (16)..(16): 2'-deoxy-2'-fluoroadenosine
  modified_base (17)..(17): 2'-O-methyladenosine
  modified_base (18)..(18): 2'-deoxy-2'-fluoroguanosine
  modified_base (19)..(19): 2'-O-methyladenosine
  modified_base (20)..(20): 2'-deoxy-2'-fluoroadenosine
  modified_base (21)..(21): 2'-O-methyladenosine
  modified_base (22)..(22): 2'-deoxy-2'-fluorocytidine
  misc_feature (22)..(23): 5'-phosphonothioate
  modified_base (23)..(23): um
uauuuuugcagaagaaagaaacu

SEQ ID NO: 6654 - RNA, 23 nt, Artificial Sequence
  siRNA antisense strand against b2GPI
  modified_base (1)..(1): 2'-deoxy-2'-fluorouridine
  modified_base (2)..(2): um
  misc_feature (2)..(3): 5'-phosphonothioate
  modified_base (3)..(3): 2'-deoxy-2'-fluoroadenosine
  modified_base (4)..(4): um
  modified_base (5)..(5): 2'-deoxy-2'-fluorouridine
  modified_base (6)..(6): um
  modified_base (7)..(7): 2'-deoxy-2'-fluorouridine
  modified_base (8)..(8): um
  modified_base (9)..(9): 2'-deoxy-2'-fluoroguanosine
  modified_base (10)..(10): cm
  modified_base (11)..(11): 2'-O-methyladenosine
  modified_base (12)..(12): 2'-deoxy-2'-fluoroguanosine
  modified_base (13)..(13): 2'-O-methyladenosine
  modified_base (14)..(14): 2'-deoxy-2'-fluoroadenosine
  modified_base (15)..(15): gm
  modified_base (16)..(16): 2'-deoxy-2'-fluoroadenosine
  modified_base (17)..(17): 2'-O-methyladenosine
  modified_base (18)..(18): 2'-deoxy-2'-fluoroadenosine
  modified_base (19)..(19): gm
  modified_base (20)..(20): 2'-deoxy-2'-fluoroadenosine
  modified_base (21)..(21): 2'-O-methyladenosine
  modified_base (22)..(22): 2'-deoxy-2'-fluoroadenosine
  misc_feature (22)..(23): 5'-phosphonothioate
  modified_base (23)..(23): cm
uuauuuuugcagaagaaagaaac

SEQ ID NO: 6655 - RNA, 23 nt, Artificial Sequence
  siRNA antisense strand against b2GPI
  modified_base (1)..(1): 2'-deoxy-2'-fluorocytidine
  modified_base (2)..(2): um
  misc_feature (2)..(3): 5'-phosphonothioate
  modified_base (3)..(3): 2'-deoxy-2'-fluorouridine
  modified_base (4)..(4): 2'-O-methyladenosine
  modified_base (5)..(5): 2'-deoxy-2'-fluorouridine
  modified_base (6)..(6): um
  modified_base (7)..(7): 2'-deoxy-2'-fluorouridine
  modified_base (8)..(8): um
  modified_base (9)..(9): 2'-deoxy-2'-fluorouridine
  modified_base (10)..(10): gm
  modified_base (11)..(11): cm
  modified_base (12)..(12): 2'-deoxy-2'-fluoroadenosine
  modified_base (13)..(13): gm
  modified_base (14)..(14): 2'-deoxy-2'-fluoroadenosine
  modified_base (15)..(15): 2'-O-methyladenosine
  modified_base (16)..(16): 2'-deoxy-2'-fluoroguanosine
  modified_base (17)..(17): 2'-O-methyladenosine
  modified_base (18)..(18): 2'-deoxy-2'-fluoroadenosine
  modified_base (19)..(19): 2'-O-methyladenosine
  modified_base (20)..(20): 2'-deoxy-2'-fluoroguanosine
  modified_base (21)..(21): 2'-O-methyladenosine
  modified_base (22)..(22): 2'-deoxy-2'-fluoroadenosine
  misc_feature (22)..(23): 5'-phosphonothioate
  modified_base (23)..(23): 2'-O-methyladenosine
cuuauuuuugcagaagaaagaaa

SEQ ID NO: 6656 - RNA, 23 nt, Artificial Sequence
  siRNA antisense strand against b2GPI
  modified_base (1)..(1): 2'-deoxy-2'-fluorouridine
  modified_base (2)..(2): um
  misc_feature (2)..(3): 5'-phosphonothioate
  modified_base (3)..(3): 2'-deoxy-2'-fluorouridine
  modified_base (4)..(4): um
  modified_base (5)..(5): 2'-deoxy-2'-fluorocytidine
  modified_base (6)..(6): cm
  modified_base (7)..(7): 2'-deoxy-2'-fluorouridine
  modified_base (8)..(8): um
  modified_base (9)..(9): 2'-deoxy-2'-fluoroadenosine
  modified_base (10)..(10): um
  modified_base (11)..(11): um
  modified_base (12)..(12): 2'-deoxy-2'-fluorouridine
  modified_base (13)..(13): um
  modified_base (14)..(14): 2'-deoxy-2'-fluorouridine
  modified_base (15)..(15): gm
  modified_base (16)..(16): 2'-deoxy-2'-fluorocytidine
  modified_base (17)..(17): 2'-O-methyladenosine
  modified_base (18)..(18): 2'-deoxy-2'-fluoroguanosine
  modified_base (19)..(19): 2'-O-methyladenosine
  modified_base (20)..(20): 2'-deoxy-2'-fluoroadenosine
  modified_base (21)..(21): gm
  modified_base (22)..(22): 2'-deoxy-2'-fluoroadenosine
  misc_feature (22)..(23): 5'-phosphonothioate
  modified_base (23)..(23): 2'-O-methyladenosine
uuuuccuuauuuuugcagaagaa

SEQ ID NO: 6657 - RNA, 23 nt, Artificial Sequence
  siRNA antisense strand against b2GPI
  modified_base (1)..(1): 2'-deoxy-2'-fluorouridine
  modified_base (2)..(2): cm
  misc_feature (2)..(3): 5'-phosphonothioate
  modified_base (3)..(3): 2'-deoxy-2'-fluorouridine
  modified_base (4)..(4): um
  modified_base (5)..(5): 2'-deoxy-2'-fluorouridine
  modified_base (6)..(6): um
  modified_base (7)..(7): 2'-deoxy-2'-fluorocytidine
  modified_base (8)..(8): cm
  modified_base (9)..(9): 2'-deoxy-2'-fluorouridine
  modified_base (10)..(10): um
  modified_base (11)..(11): 2'-O-methyladenosine
  modified_base (12)..(12): 2'-deoxy-2'-fluorouridine
  modified_base (13)..(13): um
  modified_base (14)..(14): 2'-deoxy-2'-fluorouridine
  modified_base (15)..(15): um
  modified_base (16)..(16): 2'-deoxy-2'-fluorouridine
  modified_base (17)..(17): gm
  modified_base (18)..(18): 2'-deoxy-2'-fluorocytidine
  modified_base (19)..(19): 2'-O-methyladenosine
  modified_base (20)..(20): 2'-deoxy-2'-fluoroguanosine
  modified_base (21)..(21): 2'-O-methyladenosine
  modified_base (22)..(22): 2'-deoxy-2'-fluoroadenosine
  misc_feature (22)..(23): 5'-phosphonothioate
  modified_base (23)..(23): gm
ucuuuuccuuauuuuugcagaag

SEQ ID NO: 6658 - RNA, 23 nt, Artificial Sequence
  siRNA antisense strand against b2GPI
  modified_base (1)..(1): 2'-deoxy-2'-fluorouridine
  modified_base (2)..(2): um
  misc_feature (2)..(3): 5'-phosphonothioate
  modified_base (3)..(3): 2'-deoxy-2'-fluorocytidine
  modified_base (4)..(4): um
  modified_base (5)..(5): 2'-deoxy-2'-fluorouridine
  modified_base (6)..(6): um
  modified_base (7)..(7): 2'-deoxy-2'-fluorouridine
  modified_base (8)..(8): cm
  modified_base (9)..(9): 2'-deoxy-2'-fluorocytidine
  modified_base (10)..(10): um
  modified_base (11)..(11): um
  modified_base (12)..(12): 2'-deoxy-2'-fluoroadenosine
  modified_base (13)..(13): um
  modified_base (14)..(14): 2'-deoxy-2'-fluorouridine
  modified_base (15)..(15): um
  modified_base (16)..(16): 2'-deoxy-2'-fluorouridine
  modified_base (17)..(17): um
  modified_base (18)..(18): 2'-deoxy-2'-fluoroguanosine
  modified_base (19)..(19): cm
  modified_base (20)..(20): 2'-deoxy-2'-fluoroadenosine
  modified_base (21)..(21): gm
  modified_base (22)..(22): 2'-deoxy-2'-fluoroadenosine
  misc_feature (22)..(23): 5'-phosphonothioate
  modified_base (23)..(23): 2'-O-methyladenosine
uucuuuuccuuauuuuugcagaa

SEQ ID NO: 6659 - RNA, 23 nt, Artificial Sequence
  siRNA antisense strand against b2GPI
  modified_base (1)..(1): 2'-deoxy-2'-fluorocytidine
  modified_base (2)..(2): um
  misc_feature (2)..(3): 5'-phosphonothioate
  modified_base (3)..(3): 2'-deoxy-2'-fluorouridine
  modified_base (4)..(4): cm
  modified_base (5)..(5): 2'-deoxy-2'-fluorouridine
  modified_base (6)..(6): um
  modified_base (7)..(7): 2'-deoxy-2'-fluorouridine
  modified_base (8)..(8): um
  modified_base (9)..(9): 2'-deoxy-2'-fluorocytidine
  modified_base (10)..(10): cm
  modified_base (11)..(11): um
  modified_base (12)..(12): 2'-deoxy-2'-fluorouridine
  modified_base (13)..(13): 2'-O-methyladenosine
  modified_base (14)..(14): 2'-deoxy-2'-fluorouridine
  modified_base (15)..(15): um
  modified_base (16)..(16): 2'-deoxy-2'-fluorouridine
  modified_base (17)..(17): um
  modified_base (18)..(18): 2'-deoxy-2'-fluorouridine
  modified_base (19)..(19): gm
  modified_base (20)..(20): 2'-deoxy-2'-fluorocytidine
  modified_base (21)..(21): 2'-O-methyladenosine
  modified_base (22)..(22): 2'-deoxy-2'-fluoroguanosine
  misc_feature (22)..(23): 5'-phosphonothioate
  modified_base (23)..(23): 2'-O-methyladenosine
cuucuuuuccuuauuuuugcaga

SEQ ID NO: 6660 - RNA, 23 nt, Artificial Sequence
  siRNA antisense strand against b2GPI
  modified_base (1)..(1): 2'-deoxy-2'-fluoroadenosine
  modified_base (2)..(2): gm
  misc_feature (2)..(3): 5'-phosphonothioate
  modified_base (3)..(3): 2'-deoxy-2'-fluorocytidine
  modified_base (4)..(4): um
  modified_base (5)..(5): 2'-deoxy-2'-fluoroadenosine
  modified_base (6)..(6): cm
  modified_base (7)..(7): 2'-deoxy-2'-fluoroadenosine
  modified_base (8)..(8): cm
  modified_base (9)..(9): 2'-deoxy-2'-fluorouridine
  modified_base (10)..(10): um
  modified_base (11)..(11): cm
  modified_base (12)..(12): 2'-deoxy-2'-fluorouridine
  modified_base (13)..(13): um
  modified_base (14)..(14): 2'-deoxy-2'-fluorouridine
  modified_base (15)..(15): um
  modified_base (16)..(16): 2'-deoxy-2'-fluorocytidine
  modified_base (17)..(17): cm
  modified_base (18)..(18): 2'-deoxy-2'-fluorouridine
  modified_base (19)..(19): um
  modified_base (20)..(20): 2'-deoxy-2'-fluoroadenosine
  modified_base (21)..(21): um
  modified_base (22)..(22): 2'-deoxy-2'-fluorouridine
  misc_feature (22)..(23): 5'-phosphonothioate
  modified_base (23)..(23): um
agcuacacuucuuuuccuuauuu

SEQ ID NO: 6661 - RNA, 23 nt, Artificial Sequence
  siRNA antisense strand against b2GPI
  modified_base (1)..(1): 2'-deoxy-2'-fluorouridine
  modified_base (2)..(2): 2'-O-methyladenosine
  misc_feature (2)..(3): 5'-phosphonothioate
  modified_base (3)..(3): 2'-deoxy-2'-fluoroguanosine
  modified_base (4)..(4): cm
  modified_base (5)..(5): 2'-deoxy-2'-fluorouridine
  modified_base (6)..(6): 2'-O-methyladenosine
  modified_base (7)..(7): 2'-deoxy-2'-fluorocytidine
  modified_base (8)..(8): 2'-O-methyladenosine
  modified_base (9)..(9): 2'-deoxy-2'-fluorocytidine
  modified_base (10)..(10): um
  modified_base (11)..(11): um
  modified_base (12)..(12): 2'-deoxy-2'-fluorocytidine
  modified_base (13)..(13): um
  modified_base (14)..(14): 2'-deoxy-2'-fluorouridine
  modified_base (15)..(15): um
  modified_base (16)..(16): 2'-deoxy-2'-fluorouridine
  modified_base (17)..(17): cm
  modified_base (18)..(18): 2'-deoxy-2'-fluorocytidine
  modified_base (19)..(19): um
  modified_base (20)..(20): 2'-deoxy-2'-fluorouridine
  modified_base (21)..(21): 2'-O-methyladenosine
  modified_base (22)..(22): 2'-deoxy-2'-fluorouridine
  misc_feature (22)..(23): 5'-phosphonothioate
  modified_base (23)..(23): um
uagcuacacuucuuuuccuuauu

SEQ ID NO: 6662 - RNA, 23 nt, Artificial Sequence
  siRNA antisense strand against b2GPI
  modified_base (1)..(1): 2'-deoxy-2'-fluoroadenosine
  modified_base (2)..(2): um
  misc_feature (2)..(3): 5'-phosphonothioate
  modified_base (3)..(3): 2'-deoxy-2'-fluoroadenosine
  modified_base (4)..(4): gm
  modified_base (5)..(5): 2'-deoxy-2'-fluorocytidine
  modified_base (6)..(6): um
  modified_base (7)..(7): 2'-deoxy-2'-fluoroadenosine
  modified_base (8)..(8): cm
  modified_base (9)..(9): 2'-deoxy-2'-fluoroadenosine
  modified_base (10)..(10): cm
  modified_base (11)..(11): um
  modified_base (12)..(12): 2'-deoxy-2'-fluorouridine
  modified_base (13)..(13): cm
  modified_base (14)..(14): 2'-deoxy-2'-fluorouridine
  modified_base (15)..(15): um
  modified_base (16)..(16): 2'-deoxy-2'-fluorouridine
  modified_base (17)..(17): um
  modified_base (18)..(18): 2'-deoxy-2'-fluorocytidine
  modified_base (19)..(19): cm
  modified_base (20)..(20): 2'-deoxy-2'-fluorouridine
  modified_base (21)..(21): um
  modified_base (22)..(22): 2'-deoxy-2'-fluoroadenosine
  misc_feature (22)..(23): 5'-phosphonothioate
  modified_base (23)..(23): um
auagcuacacuucuuuuccuuau

SEQ ID NO: 6663 - RNA, 23 nt, Artificial Sequence
  siRNA antisense strand against b2GPI
  modified_base (1)..(1): 2'-deoxy-2'-fluorouridine
  modified_base (2)..(2): 2'-O-methyladenosine
  misc_feature (2)..(3): 5'-phosphonothioate
  modified_base (3)..(3): 2'-deoxy-2'-fluorouridine
  modified_base (4)..(4): 2'-O-methyladenosine
  modified_base (5)..(5): 2'-deoxy-2'-fluoroguanosine
  modified_base (6)..(6): cm
  modified_base (7)..(7): 2'-deoxy-2'-fluorouridine
  modified_base (8)..(8): 2'-O-methyladenosine
  modified_base (9)..(9): 2'-deoxy-2'-fluorocytidine
  modified_base (10)..(10): 2'-O-methyladenosine
  modified_base (11)..(11): cm
  modified_base (12)..(12): 2'-deoxy-2'-fluorouridine
  modified_base (13)..(13): um
  modified_base (14)..(14): 2'-deoxy-2'-fluorocytidine
  modified_base (15)..(15): um
  modified_base (16)..(16): 2'-deoxy-2'-fluorouridine
  modified_base (17)..(17): um
  modified_base (18)..(18): 2'-deoxy-2'-fluorouridine
  modified_base (19)..(19): cm
  modified_base (20)..(20): 2'-deoxy-2'-fluorocytidine
  modified_base (21)..(21): um
  modified_base (22)..(22): 2'-deoxy-2'-fluorouridine
  misc_feature (22)..(23): 5'-phosphonothioate
  modified_base (23)..(23): 2'-O-methyladenosine
uauagcuacacuucuuuuccuua

SEQ ID NO: 6664 - RNA, 23 nt, Artificial Sequence
  siRNA antisense strand against b2GPI
  modified_base (1)..(1): 2'-deoxy-2'-fluorouridine
  modified_base (2)..(2): gm
  misc_feature (2)..(3): 5'-phosphonothioate
  modified_base (3)..(3): 2'-deoxy-2'-fluorouridine
  modified_base (4)..(4): 2'-O-methyladenosine
  modified_base (5)..(5): 2'-deoxy-2'-fluorouridine
  modified_base (6)..(6): 2'-O-methyladenosine
  modified_base (7)..(7): 2'-deoxy-2'-fluoroguanosine
  modified_base (8)..(8): cm
  modified_base (9)..(9): 2'-deoxy-2'-fluorouridine
  modified_base (10)..(10): 2'-O-methyladenosine
  modified_base (11)..(11): cm
  modified_base (12)..(12): 2'-deoxy-2'-fluoroadenosine
  modified_base (13)..(13): cm
  modified_base (14)..(14): 2'-deoxy-2'-fluorouridine
  modified_base (15)..(15): um
  modified_base (16)..(16): 2'-deoxy-2'-fluorocytidine
  modified_base (17)..(17): um
  modified_base (18)..(18): 2'-deoxy-2'-fluorouridine
  modified_base (19)..(19): um
  modified_base (20)..(20): 2'-deoxy-2'-fluorouridine
  modified_base (21)..(21): cm
  modified_base (22)..(22): 2'-deoxy-2'-fluorocytidine
  misc_feature (22)..(23): 5'-phosphonothioate
  modified_base (23)..(23): um
uguauagcuacacuucuuuuccu

SEQ ID NO: 6665 - RNA, 23 nt, Artificial Sequence
  siRNA antisense strand against b2GPI
  modified_base (1)..(1): 2'-deoxy-2'-fluorocytidine
  modified_base (2)..(2): um
  misc_feature (2)..(3): 5'-phosphonothioate
  modified_base (3)..(3): 2'-deoxy-2'-fluorocytidine
  modified_base (4)..(4): um
  modified_base (5)..(5): 2'-deoxy-2'-fluoroguanosine
  modified_base (6)..(6): um
  modified_base (7)..(7): 2'-deoxy-2'-fluoroadenosine
  modified_base (8)..(8): um
  modified_base (9)..(9): 2'-deoxy-2'-fluoroadenosine
  modified_base (10)..(10): gm
  modified_base (11)..(11): cm
  modified_base (12)..(12): 2'-deoxy-2'-fluorouridine
  modified_base (13)..(13): 2'-O-methyladenosine
  modified_base (14)..(14): 2'-deoxy-2'-fluorocytidine
  modified_base (15)..(15): 2'-O-methyladenosine
  modified_base (16)..(16): 2'-deoxy-2'-fluorocytidine
  modified_base (17)..(17): um
  modified_base (18)..(18): 2'-deoxy-2'-fluorouridine
  modified_base (19)..(19): cm
  modified_base (20)..(20): 2'-deoxy-2'-fluorouridine
  modified_base (21)..(21): um
  modified_base (22)..(22): 2'-deoxy-2'-fluorouridine
  misc_feature (22)..(23): 5'-phosphonothioate
  modified_base (23)..(23): um
cucuguauagcuacacuucuuuu

SEQ ID NO: 6666 - RNA, 23 nt, Artificial Sequence
  siRNA antisense strand against b2GPI
  modified_base (1)..(1): 2'-deoxy-2'-fluorouridine
  modified_base (2)..(2): cm
  misc_feature (2)..(3): 5'-phosphonothioate
  modified_base (3)..(3): 2'-deoxy-2'-fluorocytidine
  modified_base (4)..(4): um
  modified_base (5)..(5): 2'-deoxy-2'-fluorocytidine
  modified_base (6)..(6): um
  modified_base (7)..(7): 2'-deoxy-2'-fluoroguanosine
  modified_base (8)..(8): um
  modified_base (9)..(9): 2'-deoxy-2'-fluoroadenosine
  modified_base (10)..(10): um
  modified_base (11)..(11): 2'-O-methyladenosine
  modified_base (12)..(12): 2'-deoxy-2'-fluoroguanosine
  modified_base (13)..(13): cm
  modified_base (14)..(14): 2'-deoxy-2'-fluorouridine
  modified_base (15)..(15): 2'-O-methyladenosine
  modified_base (16)..(16): 2'-deoxy-2'-fluorocytidine
  modified_base (17)..(17): 2'-O-methyladenosine
  modified_base (18)..(18): 2'-deoxy-2'-fluorocytidine
  modified_base (19)..(19): um
  modified_base (20)..(20): 2'-deoxy-2'-fluorouridine
  modified_base (21)..(21): cm
  modified_base (22)..(22): 2'-deoxy-2'-fluorouridine
  misc_feature (22)..(23): 5'-phosphonothioate
  modified_base (23)..(23): um
uccucuguauagcuacacuucuu

SEQ ID NO: 6667 - RNA, 23 nt, Artificial Sequence
  siRNA antisense strand against b2GPI
  modified_base (1)..(1): 2'-deoxy-2'-fluoroadenosine
  modified_base (2)..(2): um
  misc_feature (2)..(3): 5'-phosphonothioate
  modified_base (3)..(3): 2'-deoxy-2'-fluorocytidine
  modified_base (4)..(4): cm
  modified_base (5)..(5): 2'-deoxy-2'-fluorouridine
  modified_base (6)..(6): cm
  modified_base (7)..(7): 2'-deoxy-2'-fluorouridine
  modified_base (8)..(8): gm
  modified_base (9)..(9): 2'-deoxy-2'-fluorouridine
  modified_base (10)..(10): 2'-O-methyladenosine
  modified_base (11)..(11): um
  modified_base (12)..(12): 2'-deoxy-2'-fluoroadenosine
  modified_base (13)..(13): gm
  modified_base (14)..(14): 2'-deoxy-2'-fluorocytidine
  modified_base (15)..(15): um
  modified_base (16)..(16): 2'-deoxy-2'-fluoroadenosine
  modified_base (17)..(17): cm
  modified_base (18)..(18): 2'-deoxy-2'-fluoroadenosine
  modified_base (19)..(19): cm
  modified_base (20)..(20): 2'-deoxy-2'-fluorouridine
  modified_base (21)..(21): um
  modified_base (22)..(22): 2'-deoxy-2'-fluorocytidine
  misc_feature (22)..(23): 5'-phosphonothioate
  modified_base (23)..(23): um
auccucuguauagcuacacuucu

SEQ ID NO: 6668 - RNA, 23 nt, Artificial Sequence
  siRNA antisense strand against b2GPI
  modified_base (1)..(1): 2'-deoxy-2'-fluoroguanosine
  modified_base (2)..(2): cm
  misc_feature (2)..(3): 5'-phosphonothioate
  modified_base (3)..(3): 2'-deoxy-2'-fluoroadenosine
  modified_base (4)..(4): um
  modified_base (5)..(5): 2'-deoxy-2'-fluorocytidine
  modified_base (6)..(6): cm
  modified_base (7)..(7): 2'-deoxy-2'-fluorouridine
  modified_base (8)..(8): cm
  modified_base (9)..(9): 2'-deoxy-2'-fluorouridine
  modified_base (10)..(10): gm
  modified_base (11)..(11): um
  modified_base (12)..(12): 2'-deoxy-2'-fluoroadenosine
  modified_base (13)..(13): um
  modified_base (14)..(14): 2'-deoxy-2'-fluoroadenosine
  modified_base (15)..(15): gm
  modified_base (16)..(16): 2'-deoxy-2'-fluorocytidine
  modified_base (17)..(17): um
  modified_base (18)..(18): 2'-deoxy-2'-fluoroadenosine
  modified_base (19)..(19): cm
  modified_base (20)..(20): 2'-deoxy-2'-fluoroadenosine
  modified_base (21)..(21): cm
  modified_base (22)..(22): 2'-deoxy-2'-fluorouridine
  misc_feature (22)..(23): 5'-phosphonothioate
  modified_base (23)..(23): um
gcauccucuguauagcuacacuu

SEQ ID NO: 6669 - RNA, 23 nt, Artificial Sequence
  siRNA antisense strand against b2GPI
  modified_base (1)..(1): 2'-deoxy-2'-fluoroadenosine
  modified_base (2)..(2): gm
  misc_feature (2)..(3): 5'-phosphonothioate
  modified_base (3)..(3): 2'-deoxy-2'-fluorocytidine
  modified_base (4)..(4): 2'-O-methyladenosine
  modified_base (5)..(5): 2'-deoxy-2'-fluorouridine
  modified_base (6)..(6): cm
  modified_base (7)..(7): 2'-deoxy-2'-fluorocytidine
  modified_base (8)..(8): um
  modified_base (9)..(9): 2'-deoxy-2'-fluorocytidine
  modified_base (10)..(10): um
  modified_base (11)..(11): gm
  modified_base (12)..(12): 2'-deoxy-2'-fluorouridine
  modified_base (13)..(13): 2'-O-methyladenosine
  modified_base (14)..(14): 2'-deoxy-2'-fluorouridine
  modified_base (15)..(15): 2'-O-methyladenosine
  modified_base (16)..(16): 2'-deoxy-2'-fluoroguanosine
  modified_base (17)..(17): cm
  modified_base (18)..(18): 2'-deoxy-2'-fluorouridine
  modified_base (19)..(19): 2'-O-methyladenosine
  modified_base (20)..(20): 2'-deoxy-2'-fluorocytidine
  modified_base (21)..(21): 2'-O-methyladenosine
  modified_base (22)..(22): 2'-deoxy-2'-fluorocytidine
  misc_feature (22)..(23): 5'-phosphonothioate
  modified_base (23)..(23): um
agcauccucuguauagcuacacu

SEQ ID NO: 6670 - RNA, 23 nt, Artificial Sequence
  siRNA antisense strand against b2GPI
  modified_base (1)..(1): 2'-deoxy-2'-fluorouridine
  modified_base (2)..(2): gm
  misc_feature (2)..(3): 5'-phosphonothioate
  modified_base (3)..(3): 2'-deoxy-2'-fluoroadenosine
  modified_base (4)..(4): gm
  modified_base (5)..(5): 2'-deoxy-2'-fluorocytidine
  modified_base (6)..(6): 2'-O-methyladenosine
  modified_base (7)..(7): 2'-deoxy-2'-fluorouridine
  modified_base (8)..(8): cm
  modified_base (9)..(9): 2'-deoxy-2'-fluorocytidine
  modified_base (10)..(10): um
  modified_base (11)..(11): cm
  modified_base (12)..(12): 2'-deoxy-2'-fluorouridine
  modified_base (13)..(13): gm
  modified_base (14)..(14): 2'-deoxy-2'-fluorouridine
  modified_base (15)..(15): 2'-O-methyladenosine
  modified_base (16)..(16): 2'-deoxy-2'-fluorouridine
  modified_base (17)..(17): 2'-O-methyladenosine
  modified_base (18)..(18): 2'-deoxy-2'-fluoroguanosine
  modified_base (19)..(19): cm
  modified_base (20)..(20): 2'-deoxy-2'-fluorouridine
  modified_base (21)..(21): 2'-O-methyladenosine
  modified_base (22)..(22): 2'-deoxy-2'-fluorocytidine
  misc_feature (22)..(23): 5'-phosphonothioate
  modified_base (23)..(23): 2'-O-methyladenosine
ugagcauccucuguauagcuaca

SEQ ID NO: 6671 - RNA, 23 nt, Artificial Sequence
  siRNA antisense strand against b2GPI
  modified_base (1)..(1): 2'-deoxy-2'-fluorocytidine
  modified_base (2)..(2): um
  misc_feature (2)..(3): 5'-phosphonothioate
  modified_base (3)..(3): 2'-deoxy-2'-fluoroguanosine
  modified_base (4)..(4): 2'-O-methyladenosine
  modified_base (5)..(5): 2'-deoxy-2'-fluoroguanosine
  modified_base (6)..(6): cm
  modified_base (7)..(7): 2'-deoxy-2'-fluoroadenosine
  modified_base (8)..(8): um
  modified_base (9)..(9): 2'-deoxy-2'-fluorocytidine
  modified_base (10)..(10): cm
  modified_base (11)..(11): um
  modified_base (12)..(12): 2'-deoxy-2'-fluorocytidine
  modified_base (13)..(13): um
  modified_base (14)..(14): 2'-deoxy-2'-fluoroguanosine
  modified_base (15)..(15): um
  modified_base (16)..(16): 2'-deoxy-2'-fluoroadenosine
  modified_base (17)..(17): um
  modified_base (18)..(18): 2'-deoxy-2'-fluoroadenosine
  modified_base (19)..(19): gm
  modified_base (20)..(20): 2'-deoxy-2'-fluorocytidine
  modified_base (21)..(21): um
  modified_base (22)..(22): 2'-deoxy-2'-fluoroadenosine
  misc_feature (22)..(23): 5'-phosphonothioate
  modified_base (23)..(23): cm
cugagcauccucuguauagcuac

SEQ ID NO: 6672 - RNA, 23 nt, Artificial Sequence
  siRNA antisense strand against b2GPI
  modified_base (1)..(1): 2'-deoxy-2'-fluorouridine
  modified_base (2)..(2): 2'-O-methyladenosine
  misc_feature (2)..(3): 5'-phosphonothioate
  modified_base (3)..(3): 2'-deoxy-2'-fluorocytidine
  modified_base (4)..(4): 2'-O-methyladenosine
  modified_base (5)..(5): 2'-deoxy-2'-fluorocytidine
  modified_base (6)..(6): um
  modified_base (7)..(7): 2'-deoxy-2'-fluoroguanosine
  modified_base (8)..(8): 2'-O-methyladenosine
  modified_base (9)..(9): 2'-deoxy-2'-fluoroguanosine
  modified_base (10)..(10): cm
  modified_base (11)..(11): 2'-O-methyladenosine
  modified_base (12)..(12): 2'-deoxy-2'-fluorouridine
  modified_base (13)..(13): cm
  modified_base (14)..(14): 2'-deoxy-2'-fluorocytidine
  modified_base (15)..(15): um
  modified_base (16)..(16): 2'-deoxy-2'-fluorocytidine
  modified_base (17)..(17): um
  modified_base (18)..(18): 2'-deoxy-2'-fluoroguanosine
  modified_base (19)..(19): um
  modified_base (20)..(20): 2'-deoxy-2'-fluoroadenosine
  modified_base (21)..(21): um
  modified_base (22)..(22): 2'-deoxy-2'-fluoroadenosine
  misc_feature (22)..(23): 5'-phosphonothioate
  modified_base (23)..(23): gm
uacacugagcauccucuguauag

SEQ ID NO: 6673 - RNA, 23 nt, Artificial Sequence
  siRNA antisense strand against b2GPI
  modified_base (1)..(1): 2'-deoxy-2'-fluorouridine
  modified_base (2)..(2): 2'-O-methyladenosine
  misc_feature (2)..(3): 5'-phosphonothioate
  modified_base (3)..(3): 2'-deoxy-2'-fluorouridine
  modified_base (4)..(4): 2'-O-methyladenosine
  modified_base (5)..(5): 2'-deoxy-2'-fluorocytidine
  modified_base (6)..(6): 2'-O-methyladenosine
  modified_base (7)..(7): 2'-deoxy-2'-fluorocytidine
  modified_base (8)..(8): um
  modified_base (9)..(9): 2'-deoxy-2'-fluoroguanosine
  modified_base (10)..(10): 2'-O-methyladenosine
  modified_base (11)..(11): gm
  modified_base (12)..(12): 2'-deoxy-2'-fluorocytidine
  modified_base (13)..(13): 2'-O-methyladenosine
  modified_base (14)..(14): 2'-deoxy-2'-fluorouridine
  modified_base (15)..(15): cm
  modified_base (16)..(16): 2'-deoxy-2'-fluorocytidine
  modified_base (17)..(17): um
  modified_base (18)..(18): 2'-deoxy-2'-fluorocytidine
  modified_base (19)..(19): um
  modified_base (20)..(20): 2'-deoxy-2'-fluoroguanosine
  modified_base (21)..(21): um
  modified_base (22)..(22): 2'-deoxy-2'-fluoroadenosine
  misc_feature (22)..(23): 5'-phosphonothioate
  modified_base (23)..(23): um
uauacacugagcauccucuguau

SEQ ID NO: 6674 - RNA, 23 nt, Artificial Sequence
  siRNA antisense strand against b2GPI
  modified_base (1)..(1): 2'-deoxy-2'-fluorocytidine
  modified_base (2)..(2): um
  misc_feature (2)..(3): 5'-phosphonothioate
  modified_base (3)..(3): 2'-deoxy-2'-fluoroadenosine
  modified_base (4)..(4): um
  modified_base (5)..(5): 2'-deoxy-2'-fluoroadenosine
  modified_base (6)..(6): cm
  modified_base (7)..(7): 2'-deoxy-2'-fluoroadenosine
  modified_base (8)..(8): cm
  modified_base (9)..(9): 2'-deoxy-2'-fluorouridine
  modified_base (10)..(10): gm
  modified_base (11)..(11): 2'-O-methyladenosine
  modified_base (12)..(12): 2'-deoxy-2'-fluoroguanosine
  modified_base (13)..(13): cm
  modified_base (14)..(14): 2'-deoxy-2'-fluoroadenosine
  modified_base (15)..(15): um
  modified_base (16)..(16): 2'-deoxy-2'-fluorocytidine
  modified_base (17)..(17): cm
  modified_base (18)..(18): 2'-deoxy-2'-fluorouridine
  modified_base (19)..(19): cm
  modified_base (20)..(20): 2'-deoxy-2'-fluorouridine
  modified_base (21)..(21): gm
  modified_base (22)..(22): 2'-deoxy-2'-fluorouridine
  misc_feature (22)..(23): 5'-phosphonothioate
  modified_base (23)..(23): 2'-O-methyladenosine
cuauacacugagcauccucugua

SEQ ID NO: 6675 - RNA, 23 nt, Artificial Sequence
  siRNA antisense strand against b2GPI
  modified_base (1)..(1): 2'-deoxy-2'-fluorouridine
  modified_base (2)..(2): cm
  misc_feature (2)..(3): 5'-phosphonothioate
  modified_base (3)..(3): 2'-deoxy-2'-fluorouridine
  modified_base (4)..(4): 2'-O-methyladenosine
  modified_base (5)..(5): 2'-deoxy-2'-fluorouridine
  modified_base (6)..(6): 2'-O-methyladenosine
  modified_base (7)..(7): 2'-deoxy-2'-fluorocytidine
  modified_base (8)..(8): 2'-O-methyladenosine
  modified_base (9)..(9): 2'-deoxy-2'-fluorocytidine
  modified_base (10)..(10): um
  modified_base (11)..(11): gm
  modified_base (12)..(12): 2'-deoxy-2'-fluoroadenosine
  modified_base (13)..(13): gm
  modified_base (14)..(14): 2'-deoxy-2'-fluorocytidine
  modified_base (15)..(15): 2'-O-methyladenosine
  modified_base (16)..(16): 2'-deoxy-2'-fluorouridine
  modified_base (17)..(17): cm
  modified_base (18)..(18): 2'-deoxy-2'-fluorocytidine
  modified_base (19)..(19): um
  modified_base (20)..(20): 2'-deoxy-2'-fluorocytidine
  modified_base (21)..(21): um
  modified_base (22)..(22): 2'-deoxy-2'-fluoroguanosine
  misc_feature (22)..(23): 5'-phosphonothioate
  modified_base (23)..(23): um
ucuauacacugagcauccucugu

SEQ ID NO: 6676 - RNA, 23 nt, Artificial Sequence
  siRNA antisense strand against b2GPI
  modified_base (1)..(1): 2'-deoxy-2'-fluoroadenosine
  modified_base (2)..(2): um
  misc_feature (2)..(3): 5'-phosphonothioate
  modified_base (3)..(3): 2'-deoxy-2'-fluorocytidine
  modified_base (4)..(4): um
  modified_base (5)..(5): 2'-deoxy-2'-fluoroadenosine
  modified_base (6)..(6): um
  modified_base (7)..(7): 2'-deoxy-2'-fluoroadenosine
  modified_base (8)..(8): cm
  modified_base (9)..(9): 2'-deoxy-2'-fluoroadenosine
  modified_base (10)..(10): cm
  modified_base (11)..(11): um
  modified_base (12)..(12): 2'-deoxy-2'-fluoroguanosine
  modified_base (13)..(13): 2'-O-methyladenosine
  modified_base (14)..(14): 2'-deoxy-2'-fluoroguanosine
  modified_base (15)..(15): cm
  modified_base (16)..(16): 2'-deoxy-2'-fluoroadenosine
  modified_base (17)..(17): um
  modified_base (18)..(18): 2'-deoxy-2'-fluorocytidine
  modified_base (19)..(19): cm
  modified_base (20)..(20): 2'-deoxy-2'-fluorouridine
  modified_base (21)..(21): cm
  modified_base (22)..(22): 2'-deoxy-2'-fluorouridine
  misc_feature (22)..(23): 5'-phosphonothioate
  modified_base (23)..(23): gm
aucuauacacugagcauccucug

SEQ ID NO: 6677 - RNA, 23 nt, Artificial Sequence
  siRNA antisense strand against b2GPI
  modified_base (1)..(1): 2'-deoxy-2'-fluorocytidine
  modified_base (2)..(2): 2'-O-methyladenosine
  misc_feature (2)..(3): 5'-phosphonothioate
  modified_base (3)..(3): 2'-deoxy-2'-fluorouridine
  modified_base (4)..(4): cm
  modified_base (5)..(5): 2'-deoxy-2'-fluorouridine
  modified_base (6)..(6): 2'-O-methyladenosine
  modified_base (7)..(7): 2'-deoxy-2'-fluorouridine
  modified_base (8)..(8): 2'-O-methyladenosine
  modified_base (9)..(9): 2'-deoxy-2'-fluorocytidine
  modified_base (10)..(10): 2'-O-methyladenosine
  modified_base (11)..(11): cm
  modified_base (12)..(12): 2'-deoxy-2'-fluorouridine
  modified_base (13)..(13): gm
  modified_base (14)..(14): 2'-deoxy-2'-fluoroadenosine
  modified_base (15)..(15): gm
  modified_base (16)..(16): 2'-deoxy-2'-fluorocytidine
  modified_base (17)..(17): 2'-O-methyladenosine
  modified_base (18)..(18): 2'-deoxy-2'-fluorouridine
  modified_base (19)..(19): cm
  modified_base (20)..(20): 2'-deoxy-2'-fluorocytidine
  modified_base (21)..(21): um
  modified_base (22)..(22): 2'-deoxy-2'-fluorocytidine
  misc_feature (22)..(23): 5'-phosphonothioate
  modified_base (23)..(23): um
caucuauacacugagcauccucu

SEQ ID NO: 6678 - RNA, 23 nt, Artificial Sequence
  siRNA antisense strand against b2GPI
  modified_base (1)..(1): 2'-deoxy-2'-fluoroadenosine
  modified_base (2)..(2): gm
  misc_feature (2)..(3): 5'-phosphonothioate
  modified_base (3)..(3): 2'-deoxy-2'-fluorouridine
  modified_base (4)..(4): gm
  modified_base (5)..(5): 2'-deoxy-2'-fluorocytidine
  modified_base (6)..(6): cm
  modified_base (7)..(7): 2'-deoxy-2'-fluoroadenosine
  modified_base (8)..(8): um
  modified_base (9)..(9): 2'-deoxy-2'-fluorocytidine
  modified_base (10)..(10): um
  modified_base (11)..(11): 2'-O-methyladenosine
  modified_base (12)..(12): 2'-deoxy-2'-fluorouridine
  modified_base (13)..(13): 2'-O-methyladenosine
  modified_base (14)..(14): 2'-deoxy-2'-fluorocytidine
  modified_base (15)..(15): 2'-O-methyladenosine
  modified_base (16)..(16): 2'-deoxy-2'-fluorocytidine
  modified_base (17)..(17): um
  modified_base (18)..(18): 2'-deoxy-2'-fluoroguanosine
  modified_base (19)..(19): 2'-O-methyladenosine
  modified_base (20)..(20): 2'-deoxy-2'-fluoroguanosine
  modified_base (21)..(21): cm
  modified_base (22)..(22): 2'-deoxy-2'-fluoroadenosine
  misc_feature (22)..(23): 5'-phosphonothioate
  modified_base (23)..(23): um
agugccaucuauacacugagcau

SEQ ID NO: 6679 - RNA, 23 nt, Artificial Sequence
  siRNA antisense strand against b2GPI
  modified_base (1)..(1): 2'-deoxy-2'-fluorouridine
  modified_base (2)..(2): 2'-O-methyladenosine
  misc_feature (2)..(3): 5'-phosphonothioate
  modified_base (3)..(3): 2'-deoxy-2'-fluoroguanosine
  modified_base (4)..(4): um
  modified_base (5)..(5): 2'-deoxy-2'-fluoroguanosine
  modified_base (6)..(6): cm
  modified_base (7)..(7): 2'-deoxy-2'-fluorocytidine
  modified_base (8)..(8): 2'-O-methyladenosine
  modified_base (9)..(9): 2'-deoxy-2'-fluorouridine
  modified_base (10)..(10): cm
  modified_base (11)..(11): um
  modified_base (12)..(12): 2'-deoxy-2'-fluoroadenosine
  modified_base (13)..(13): um
  modified_base (14)..(14): 2'-deoxy-2'-fluoroadenosine
  modified_base (15)..(15): cm
  modified_base (16)..(16): 2'-deoxy-2'-fluoroadenosine
  modified_base (17)..(17): cm
  modified_base (18)..(18): 2'-deoxy-2'-fluorouridine
  modified_base (19)..(19): gm
  modified_base (20)..(20): 2'-deoxy-2'-fluoroadenosine
  modified_base (21)..(21): gm
  modified_base (22)..(22): 2'-deoxy-2'-fluorocytidine
  misc_feature (22)..(23): 5'-phosphonothioate
  modified_base (23)..(23): 2'-O-methyladenosine
uagugccaucuauacacugagca

SEQ ID NO: 6680 - RNA, 23 nt, Artificial Sequence
  siRNA antisense strand against b2GPI
  modified_base (1)..(1): 2'-deoxy-2'-fluoroadenosine
  modified_base (2)..(2): um
  misc_feature (2)..(3): 5'-phosphonothioate
  modified_base (3)..(3): 2'-deoxy-2'-fluoroadenosine
  modified_base (4)..(4): gm
  modified_base (5)..(5): 2'-deoxy-2'-fluorouridine
  modified_base (6)..(6): gm
  modified_base (7)..(7): 2'-deoxy-2'-fluorocytidine
  modified_base (8)..(8): cm
  modified_base (9)..(9): 2'-deoxy-2'-fluoroadenosine
  modified_base (10)..(10): um
  modified_base (11)..(11): cm
  modified_base (12)..(12): 2'-deoxy-2'-fluorouridine
  modified_base (13)..(13): 2'-O-methyladenosine
  modified_base (14)..(14): 2'-deoxy-2'-fluorouridine
  modified_base (15)..(15): 2'-O-methyladenosine
  modified_base (16)..(16): 2'-deoxy-2'-fluorocytidine
  modified_base (17)..(17): 2'-O-methyladenosine
  modified_base (18)..(18): 2'-deoxy-2'-fluorocytidine
  modified_base (19)..(19): um
  modified_base (20)..(20): 2'-deoxy-2'-fluoroguanosine
  modified_base (21)..(21): 2'-O-methyladenosine
  modified_base (22)..(22): 2'-deoxy-2'-fluoroguanosine
  misc_feature (22)..(23): 5'-phosphonothioate
  modified_base (23)..(23): cm
auagugccaucuauacacugagc

SEQ ID NO: 6681 - RNA, 23 nt, Artificial Sequence
  siRNA antisense strand against b2GPI
  modified_base (1)..(1): 2'-deoxy-2'-fluoroguanosine
  modified_base (2)..(2): 2'-O-methyladenosine
  misc_feature (2)..(3): 5'-phosphonothioate
  modified_base (3)..(3): 2'-deoxy-2'-fluorouridine
  modified_base (4)..(4): 2'-O-methyladenosine
  modified_base (5)..(5): 2'-deoxy-2'-fluoroguanosine
  modified_base (6)..(6): um
  modified_base (7)..(7): 2'-deoxy-2'-fluoroguanosine
  modified_base (8)..(8): cm
  modified_base (9)..(9): 2'-deoxy-2'-fluorocytidine
  modified_base (10)..(10): 2'-O-methyladenosine
  modified_base (11)..(11): um
  modified_base (12)..(12): 2'-deoxy-2'-fluorocytidine
  modified_base (13)..(13): um
  modified_base (14)..(14): 2'-deoxy-2'-fluoroadenosine
  modified_base (15)..(15): um
  modified_base (16)..(16): 2'-deoxy-2'-fluoroadenosine
  modified_base (17)..(17): cm
  modified_base (18)..(18): 2'-deoxy-2'-fluoroadenosine
  modified_base (19)..(19): cm
  modified_base (20)..(20): 2'-deoxy-2'-fluorouridine
  modified_base (21)..(21): gm
  modified_base (22)..(22): 2'-deoxy-2'-fluoroadenosine
  misc_feature (22)..(23): 5'-phosphonothioate
  modified_base (23)..(23): gm
gauagugccaucuauacacugag

SEQ ID NO: 6682 - RNA, 23 nt, Artificial Sequence
  siRNA antisense strand against b2GPI
  modified_base (1)..(1): 2'-deoxy-2'-fluorocytidine
  modified_base (2)..(2): gm
  misc_feature (2)..(3): 5'-phosphonothioate
  modified_base (3)..(3): 2'-deoxy-2'-fluoroadenosine
  modified_base (4)..(4): um
  modified_base (5)..(5): 2'-deoxy-2'-fluoroadenosine
  modified_base (6)..(6): gm
  modified_base (7)..(7): 2'-deoxy-2'-fluorouridine
  modified_base (8)..(8): gm
  modified_base (9)..(9): 2'-deoxy-2'-fluorocytidine
  modified_base (10)..(10): cm
  modified_base (11)..(11): 2'-O-methyladenosine
  modified_base (12)..(12): 2'-deoxy-2'-fluorouridine
  modified_base (13)..(13): cm
  modified_base (14)..(14): 2'-deoxy-2'-fluorouridine
  modified_base (15)..(15): 2'-O-methyladenosine
  modified_base (16)..(16): 2'-deoxy-2'-fluorouridine
  modified_base (17)..(17): 2'-O-methyladenosine
  modified_base (18)..(18): 2'-deoxy-2'-fluorocytidine
  modified_base (19)..(19): 2'-O-methyladenosine
  modified_base (20)..(20): 2'-deoxy-2'-fluorocytidine
  modified_base (21)..(21): um
  modified_base (22)..(22): 2'-deoxy-2'-fluoroguanosine
  misc_feature (22)..(23): 5'-phosphonothioate
  modified_base (23)..(23): 2'-O-methyladenosine
cgauagugccaucuauacacuga

SEQ ID NO: 6683 - RNA, 23 nt, Artificial Sequence
  siRNA antisense strand against b2GPI
  modified_base (1)..(1): 2'-deoxy-2'-fluorouridine
  modified_base (2)..(2): cm
  misc_feature (2)..(3): 5'-phosphonothioate
  modified_base (3)..(3): 2'-deoxy-2'-fluoroguanosine
  modified_base (4)..(4): 2'-O-methyladenosine
  modified_base (5)..(5): 2'-deoxy-2'-fluorouridine
  modified_base (6)..(6): 2'-O-methyladenosine
  modified_base (7)..(7): 2'-deoxy-2'-fluoroguanosine
  modified_base (8)..(8): um
  modified_base (9)..(9): 2'-deoxy-2'-fluoroguanosine
  modified_base (10)..(10): cm
  modified_base (11)..(11): cm
  modified_base (12)..(12): 2'-deoxy-2'-fluoroadenosine
  modified_base (13)..(13): um
  modified_base (14)..(14): 2'-deoxy-2'-fluorocytidine
  modified_base (15)..(15): um
  modified_base (16)..(16): 2'-deoxy-2'-fluoroadenosine
  modified_base (17)..(17): um
  modified_base (18)..(18): 2'-deoxy-2'-fluoroadenosine
  modified_base (19)..(19): cm
  modified_base (20)..(20): 2'-deoxy-2'-fluoroadenosine
  modified_base (21)..(21): cm
  modified_base (22)..(22): 2'-deoxy-2'-fluorouridine
  misc_feature (22)..(23): 5'-phosphonothioate
  modified_base (23)..(23): gm
ucgauagugccaucuauacacug

SEQ ID NO: 6684 - RNA, 23 nt, Artificial Sequence
  siRNA antisense strand against b2GPI
  modified_base (1)..(1): 2'-deoxy-2'-fluorouridine
  modified_base (2)..(2): um
  misc_feature (2)..(3): 5'-phosphonothioate
  modified_base (3)..(3): 2'-deoxy-2'-fluorocytidine
  modified_base (4)..(4): gm
  modified_base (5)..(5): 2'-deoxy-2'-fluoroadenosine
  modified_base (6)..(6): um
  modified_base (7)..(7): 2'-deoxy-2'-fluoroadenosine
  modified_base (8)..(8): gm
  modified_base (9)..(9): 2'-deoxy-2'-fluorouridine
  modified_base (10)..(10): gm
  modified_base (11)..(11): cm
  modified_base (12)..(12): 2'-deoxy-2'-fluorocytidine
  modified_base (13)..(13): 2'-O-methyladenosine
  modified_base (14)..(14): 2'-deoxy-2'-fluorouridine
  modified_base (15)..(15): cm
  modified_base (16)..(16): 2'-deoxy-2'-fluorouridine
  modified_base (17)..(17): 2'-O-methyladenosine
  modified_base (18)..(18): 2'-deoxy-2'-fluorouridine
  modified_base (19)..(19): 2'-O-methyladenosine
  modified_base (20)..(20): 2'-deoxy-2'-fluorocytidine
  modified_base (21)..(21): 2'-O-methyladenosine
  modified_base (22)..(22): 2'-deoxy-2'-fluorocytidine
  misc_feature (22)..(23): 5'-phosphonothioate
  modified_base (23)..(23): um
uucgauagugccaucuauacacu

SEQ ID NO: 6685 - RNA, 23 nt, Artificial Sequence
  siRNA antisense strand against b2GPI
  modified_base (1)..(1): 2'-deoxy-2'-fluorocytidine
  modified_base (2)..(2): um
  misc_feature (2)..(3): 5'-phosphonothioate
  modified_base (3)..(3): 2'-deoxy-2'-fluorouridine
  modified_base (4)..(4): cm
  modified_base (5)..(5): 2'-deoxy-2'-fluoroguanosine
  modified_base (6)..(6): 2'-O-methyladenosine
  modified_base (7)..(7): 2'-deoxy-2'-fluorouridine
  modified_base (8)..(8): 2'-O-methyladenosine
  modified_base (9)..(9): 2'-deoxy-2'-fluoroguanosine
  modified_base (10)..(10): um
  modified_base (11)..(11): gm
  modified_base (12)..(12): 2'-deoxy-2'-fluorocytidine
  modified_base (13)..(13): cm
  modified_base (14)..(14): 2'-deoxy-2'-fluoroadenosine
  modified_base (15)..(15): um
  modified_base (16)..(16): 2'-deoxy-2'-fluorocytidine
  modified_base (17)..(17): um
  modified_base (18)..(18): 2'-deoxy-2'-fluoroadenosine
  modified_base (19)..(19): um
  modified_base (20)..(20): 2'-deoxy-2'-fluoroadenosine
  modified_base (21)..(21): cm
  modified_base (22)..(22): 2'-deoxy-2'-fluoroadenosine
  misc_feature (22)..(23): 5'-phosphonothioate
  modified_base (23)..(23): cm
cuucgauagugccaucuauacac

SEQ ID NO: 6686 - RNA, 23 nt, Artificial Sequence
  siRNA antisense strand against b2GPI
  modified_base (1)..(1): 2'-deoxy-2'-fluoroguanosine
  modified_base (2)..(2): 2'-O-methyladenosine
  misc_feature (2)..(3): 5'-phosphonothioate
  modified_base (3)..(3): 2'-deoxy-2'-fluorocytidine
  modified_base (4)..(4): um
  modified_base (5)..(5): 2'-deoxy-2'-fluorouridine
  modified_base (6)..(6): cm
  modified_base (7)..(7): 2'-deoxy-2'-fluoroguanosine
  modified_base (8)..(8): 2'-O-methyladenosine
  modified_base (9)..(9): 2'-deoxy-2'-fluorouridine
  modified_base (10)..(10): 2'-O-methyladenosine
  modified_base (11)..(11): gm
  modified_base (12)..(12): 2'-deoxy-2'-fluorouridine
  modified_base (13)..(13): gm
  modified_base (14)..(14): 2'-deoxy-2'-fluorocytidine
  modified_base (15)..(15): cm
  modified_base (16)..(16): 2'-deoxy-2'-fluoroadenosine
  modified_base (17)..(17): um
  modified_base (18)..(18): 2'-deoxy-2'-fluorocytidine
  modified_base (19)..(19): um
  modified_base (20)..(20): 2'-deoxy-2'-fluoroadenosine
  modified_base (21)..(21): um
  modified_base (22)..(22): 2'-deoxy-2'-fluoroadenosine
  misc_feature (22)..(23): 5'-phosphonothioate
  modified_base (23)..(23): cm
gacuucgauagugccaucuauac

SEQ ID NO: 6687 - RNA, 23 nt, Artificial Sequence
  siRNA antisense strand against b2GPI
  modified_base (1)..(1): 2'-deoxy-2'-fluoroguanosine
  modified_base (2)..(2): gm
  misc_feature (2)..(3): 5'-phosphonothioate
  modified_base (3)..(3): 2'-deoxy-2'-fluoroguanosine
  modified_base (4)..(4): 2'-O-methyladenosine
  modified_base (5)..(5): 2'-deoxy-2'-fluorocytidine
  modified_base (6)..(6): um
  modified_base (7)..(7): 2'-deoxy-2'-fluorouridine
  modified_base (8)..(8): cm
  modified_base (9)..(9): 2'-deoxy-2'-fluoroguanosine
  modified_base (10)..(10): 2'-O-methyladenosine
  modified_base (11)..(11): um
  modified_base (12)..(12): 2'-deoxy-2'-fluoroadenosine
  modified_base (13)..(13): gm
  modified_base (14)..(14): 2'-deoxy-2'-fluorouridine
  modified_base (15)..(15): gm
  modified_base (16)..(16): 2'-deoxy-2'-fluorocytidine
  modified_base (17)..(17): cm
  modified_base (18)..(18): 2'-deoxy-2'-fluoroadenosine
  modified_base (19)..(19): um
  modified_base (20)..(20): 2'-deoxy-2'-fluorocytidine
  modified_base (21)..(21): um
  modified_base (22)..(22): 2'-deoxy-2'-fluoroadenosine
  misc_feature (22)..(23): 5'-phosphonothioate
  modified_base (23)..(23): um
gggacuucgauagugccaucuau

SEQ ID NO: 6688 - RNA, 23 nt, Artificial Sequence
  siRNA antisense strand against b2GPI
  modified_base (1)..(1): 2'-deoxy-2'-fluorouridine
  modified_base (2)..(2): gm
  misc_feature (2)..(3): 5'-phosphonothioate
  modified_base (3)..(3): 2'-deoxy-2'-fluoroguanosine
  modified_base (4)..(4): gm
  modified_base (5)..(5): 2'-deoxy-2'-fluoroguanosine
  modified_base (6)..(6): 2'-O-methyladenosine
  modified_base (7)..(7): 2'-deoxy-2'-fluorocytidine
  modified_base (8)..(8): um
  modified_base (9)..(9): 2'-deoxy-2'-fluorouridine
  modified_base (10)..(10): cm
  modified_base (11)..(11): gm
  modified_base (12)..(12): 2'-deoxy-2'-fluoroadenosine
  modified_base (13)..(13): um
  modified_base (14)..(14): 2'-deoxy-2'-fluoroadenosine
  modified_base (15)..(15): gm
  modified_base (16)..(16): 2'-deoxy-2'-fluorouridine
  modified_base (17)..(17): gm
  modified_base (18)..(18): 2'-deoxy-2'-fluorocytidine
  modified_base (19)..(19): cm
  modified_base (20)..(20): 2'-deoxy-2'-fluoroadenosine
  modified_base (21)..(21): um
  modified_base (22)..(22): 2'-deoxy-2'-fluorocytidine
  misc_feature (22)..(23): 5'-phosphonothioate
  modified_base (23)..(23): um
uggggacuucgauagugccaucu

SEQ ID NO: 6689 - RNA, 23 nt, Artificial Sequence
  siRNA antisense strand against b2GPI
  modified_base (1)..(1): 2'-deoxy-2'-fluorouridine
  modified_base (2)..(2): um
  misc_feature (2)..(3): 5'-phosphonothioate
  modified_base (3)..(3): 2'-deoxy-2'-fluoroguanosine
  modified_base (4)..(4): gm
  modified_base (5)..(5): 2'-deoxy-2'-fluoroguanosine
  modified_base (6)..(6): gm
  modified_base (7)..(7): 2'-deoxy-2'-fluoroadenosine
  modified_base (8)..(8): cm
  modified_base (9)..(9): 2'-deoxy-2'-fluorouridine
  modified_base (10)..(10): um
  modified_base (11)..(11): cm
  modified_base (12)..(12): 2'-deoxy-2'-fluoroguanosine
  modified_base (13)..(13): 2'-O-methyladenosine
  modified_base (14)..(14): 2'-deoxy-2'-fluorouridine
  modified_base (15)..(15): 2'-O-methyladenosine
  modified_base (16)..(16): 2'-deoxy-2'-fluoroguanosine
  modified_base (17)..(17): um
  modified_base (18)..(18): 2'-deoxy-2'-fluoroguanosine
  modified_base (19)..(19): cm
  modified_base (20)..(20): 2'-deoxy-2'-fluorocytidine
  modified_base (21)..(21): 2'-O-methyladenosine
  modified_base (22)..(22): 2'-deoxy-2'-fluorouridine
  misc_feature (22)..(23): 5'-phosphonothioate
  modified_base (23)..(23): cm
uuggggacuucgauagugccauc

SEQ ID NO: 6690 - RNA, 23 nt, Artificial Sequence
  siRNA antisense strand against b2GPI
  modified_base (1)..(1): 2'-deoxy-2'-fluorouridine
  modified_base (2)..(2): um
  misc_feature (2)..(3): 5'-phosphonothioate
  modified_base (3)..(3): 2'-deoxy-2'-fluorouridine
  modified_base (4)..(4): gm
  modified_base (5)..(5): 2'-deoxy-2'-fluoroguanosine
  modified_base (6)..(6): gm
  modified_base (7)..(7): 2'-deoxy-2'-fluoroguanosine
  modified_base (8)..(8): 2'-O-methyladenosine
  modified_base (9)..(9): 2'-deoxy-2'-fluorocytidine
  modified_base (10)..(10): um
  modified_base (11)..(11): um
  modified_base (12)..(12): 2'-deoxy-2'-fluorocytidine
  modified_base (13)..(13): gm
  modified_base (14)..(14): 2'-deoxy-2'-fluoroadenosine
  modified_base (15)..(15): um
  modified_base (16)..(16): 2'-deoxy-2'-fluoroadenosine
  modified_base (17)..(17): gm
  modified_base (18)..(18): 2'-deoxy-2'-fluorouridine
  modified_base (19)..(19): gm
  modified_base (20)..(20): 2'-deoxy-2'-fluorocytidine
  modified_base (21)..(21): cm
  modified_base (22)..(22): 2'-deoxy-2'-fluoroadenosine
  misc_feature (22)..(23): 5'-phosphonothioate
  modified_base (23)..(23): um
uuuggggacuucgauagugccau

SEQ ID NO: 6691 - RNA, 23 nt, Artificial Sequence
  siRNA antisense strand against b2GPI
  modified_base (1)..(1): 2'-deoxy-2'-fluorocytidine
  modified_base (2)..(2): 2'-O-methyladenosine
  misc_feature (2)..(3): 5'-phosphonothioate
  modified_base (3)..(3): 2'-deoxy-2'-fluorouridine
  modified_base (4)..(4): um
  modified_base (5)..(5): 2'-deoxy-2'-fluorouridine
  modified_base (6)..(6): gm
  modified_base (7)..(7): 2'-deoxy-2'-fluoroguanosine
  modified_base (8)..(8): gm
  modified_base (9)..(9): 2'-deoxy-2'-fluoroguanosine
  modified_base (10)..(10): 2'-O-methyladenosine
  modified_base (11)..(11): cm
  modified_base (12)..(12): 2'-deoxy-2'-fluorouridine
  modified_base (13)..(13): um
  modified_base (14)..(14): 2'-deoxy-2'-fluorocytidine
  modified_base (15)..(15): gm
  modified_base (16)..(16): 2'-deoxy-2'-fluoroadenosine
  modified_base (17)..(17): um
  modified_base (18)..(18): 2'-deoxy-2'-fluoroadenosine
  modified_base (19)..(19): gm
  modified_base (20)..(20): 2'-deoxy-2'-fluorouridine
  modified_base (21)..(21): gm
  modified_base (22)..(22): 2'-deoxy-2'-fluorocytidine
  misc_feature (22)..(23): 5'-phosphonothioate
  modified_base (23)..(23): cm
cauuuggggacuucgauagugcc

SEQ ID NO: 6692 - RNA, 23 nt, Artificial Sequence
  siRNA antisense strand against b2GPI
  modified_base (1)..(1): 2'-deoxy-2'-fluoroadenosine
  modified_base (2)..(2): gm
  misc_feature (2)..(3): 5'-phosphonothioate
  modified_base (3)..(3): 2'-deoxy-2'-fluorocytidine
  modified_base (4)..(4): 2'-O-methyladenosine
  modified_base (5)..(5): 2'-deoxy-2'-fluorouridine
  modified_base (6)..(6): um
  modified_base (7)..(7): 2'-deoxy-2'-fluorouridine
  modified_base (8)..(8): gm
  modified_base (9)..(9): 2'-deoxy-2'-fluoroguanosine
  modified_base (10)..(10): gm
  modified_base (11)..(11): gm
  modified_base (12)..(12): 2'-deoxy-2'-fluoroadenosine
  modified_base (13)..(13): cm
  modified_base (14)..(14): 2'-deoxy-2'-fluorouridine
  modified_base (15)..(15): um
  modified_base (16)..(16): 2'-deoxy-2'-fluorocytidine
  modified_base (17)..(17): gm
  modified_base (18)..(18): 2'-deoxy-2'-fluoroadenosine
  modified_base (19)..(19): um
  modified_base (20)..(20): 2'-deoxy-2'-fluoroadenosine
  modified_base (21)..(21): gm
  modified_base (22)..(22): 2'-deoxy-2'-fluorouridine
  misc_feature (22)..(23): 5'-phosphonothioate
  modified_base (23)..(23): gm
agcauuuggggacuucgauagug

SEQ ID NO: 6693 - RNA, 23 nt, Artificial Sequence
  siRNA antisense strand against b2GPI
  modified_base (1)..(1): 2'-deoxy-2'-fluoroadenosine
  modified_base (2)..(2): 2'-O-methyladenosine
  misc_feature (2)..(3): 5'-phosphonothioate
  modified_base (3)..(3): 2'-deoxy-2'-fluoroguanosine
  modified_base (4)..(4): cm
  modified_base (5)..(5): 2'-deoxy-2'-fluoroadenosine
  modified_base (6)..(6): um
  modified_base (7)..(7): 2'-deoxy-2'-fluorouridine
  modified_base (8)..(8): um
  modified_base (9)..(9): 2'-deoxy-2'-fluoroguanosine
  modified_base (10)..(10): gm
  modified_base (11)..(11): gm
  modified_base (12)..(12): 2'-deoxy-2'-fluoroguanosine
  modified_base (13)..(13): 2'-O-methyladenosine
  modified_base (14)..(14): 2'-deoxy-2'-fluorocytidine
  modified_base (15)..(15): um
  modified_base (16)..(16): 2'-deoxy-2'-fluorouridine
  modified_base (17)..(17): cm
  modified_base (18)..(18): 2'-deoxy-2'-fluoroguanosine
  modified_base (19)..(19): 2'-O-methyladenosine
  modified_base (20)..(20): 2'-deoxy-2'-fluorouridine
  modified_base (21)..(21): 2'-O-methyladenosine
  modified_base (22)..(22): 2'-deoxy-2'-fluoroguanosine
  misc_feature (22)..(23): 5'-phosphonothioate
  modified_base (23)..(23): um
aagcauuuggggacuucgauagu

SEQ ID NO: 6694 - RNA, 23 nt, Artificial Sequence
  siRNA antisense strand against b2GPI
  modified_base (1)..(1): 2'-deoxy-2'-fluoroguanosine
  modified_base (2)..(2): 2'-O-methyladenosine
  misc_feature (2)..(3): 5'-phosphonothioate
  modified_base (3)..(3): 2'-deoxy-2'-fluoroadenosine
  modified_base (4)..(4): gm
  modified_base (5)..(5): 2'-deoxy-2'-fluorocytidine
  modified_base (6)..(6): 2'-O-methyladenosine
  modified_base (7)..(7): 2'-deoxy-2'-fluorouridine
  modified_base (8)..(8): um
  modified_base (9)..(9): 2'-deoxy-2'-fluorouridine
  modified_base (10)..(10): gm
  modified_base (11)..(11): gm
  modified_base (12)..(12): 2'-deoxy-2'-fluoroguanosine
  modified_base (13)..(13): gm
  modified_base (14)..(14): 2'-deoxy-2'-fluoroadenosine
  modified_base (15)..(15): cm
  modified_base (16)..(16): 2'-deoxy-2'-fluorouridine
  modified_base (17)..(17): um
  modified_base (18)..(18): 2'-deoxy-2'-fluorocytidine
  modified_base (19)..(19): gm
  modified_base (20)..(20): 2'-deoxy-2'-fluoroadenosine
  modified_base (21)..(21): um
  modified_base (22)..(22): 2'-deoxy-2'-fluoroadenosine
  misc_feature (22)..(23): 5'-phosphonothioate
  modified_base (23)..(23): gm
gaagcauuuggggacuucgauag

SEQ ID NO: 6695 - RNA, 23 nt, Artificial Sequence
  siRNA antisense strand against b2GPI
  modified_base (1)..(1): 2'-deoxy-2'-fluorouridine
  modified_base (2)..(2): gm
  misc_feature (2)..(3): 5'-phosphonothioate
  modified_base (3)..(3): 2'-deoxy-2'-fluoroadenosine
  modified_base (4)..(4): 2'-O-methyladenosine
  modified_base (5)..(5): 2'-deoxy-2'-fluoroguanosine
  modified_base (6)..(6): cm
  modified_base (7)..(7): 2'-deoxy-2'-fluoroadenosine
  modified_base (8)..(8): um
  modified_base (9)..(9): 2'-deoxy-2'-fluorouridine
  modified_base (10)..(10): um
  modified_base (11)..(11): gm
  modified_base (12)..(12): 2'-deoxy-2'-fluoroguanosine
  modified_base (13)..(13): gm
  modified_base (14)..(14): 2'-deoxy-2'-fluoroguanosine
  modified_base (15)..(15): 2'-O-methyladenosine
  modified_base (16)..(16): 2'-deoxy-2'-fluorocytidine
  modified_base (17)..(17): um
  modified_base (18)..(18): 2'-deoxy-2'-fluorouridine
  modified_base (19)..(19): cm
  modified_base (20)..(20): 2'-deoxy-2'-fluoroguanosine
  modified_base (21)..(21): 2'-O-methyladenosine
  modified_base (22)..(22): 2'-deoxy-2'-fluorouridine
  misc_feature (22)..(23): 5'-phosphonothioate
  modified_base (23)..(23): 2'-O-methyladenosine
ugaagcauuuggggacuucgaua

SEQ ID NO: 6696 - RNA, 23 nt, Artificial Sequence
  siRNA antisense strand against b2GPI
  modified_base (1)..(1): 2'-deoxy-2'-fluorocytidine
  modified_base (2)..(2): cm
  misc_feature (2)..(3): 5'-phosphonothioate
  modified_base (3)..(3): 2'-deoxy-2'-fluorouridine
  modified_base (4)..(4): um
  modified_base (5)..(5): 2'-deoxy-2'-fluoroguanosine
  modified_base (6)..(6): 2'-O-methyladenosine
  modified_base (7)..(7): 2'-deoxy-2'-fluoroadenosine
  modified_base (8)..(8): gm
  modified_base (9)..(9): 2'-deoxy-2'-fluorocytidine
  modified_base (10)..(10): 2'-O-methyladenosine
  modified_base (11)..(11): um
  modified_base (12)..(12): 2'-deoxy-2'-fluorouridine
  modified_base (13)..(13): um
  modified_base (14)..(14): 2'-deoxy-2'-fluoroguanosine
  modified_base (15)..(15): gm
  modified_base (16)..(16): 2'-deoxy-2'-fluoroguanosine
  modified_base (17)..(17): gm
  modified_base (18)..(18): 2'-deoxy-2'-fluoroadenosine
  modified_base (19)..(19): cm
  modified_base (20)..(20): 2'-deoxy-2'-fluorouridine
  modified_base (21)..(21): um
  modified_base (22)..(22): 2'-deoxy-2'-fluorocytidine
  misc_feature (22)..(23): 5'-phosphonothioate
  modified_base (23)..(23): gm
ccuugaagcauuuggggacuucg

SEQ ID NO: 6697 - RNA, 23 nt, Artificial Sequence
  siRNA antisense strand against b2GPI
  modified_base (1)..(1): 2'-deoxy-2'-fluorouridine
  modified_base (2)..(2): cm
  misc_feature (2)..(3): 5'-phosphonothioate
  modified_base (3)..(3): 2'-deoxy-2'-fluorocytidine
  modified_base (4)..(4): um
  modified_base (5)..(5): 2'-deoxy-2'-fluorouridine
  modified_base (6)..(6): gm
  modified_base (7)..(7): 2'-deoxy-2'-fluoroadenosine
  modified_base (8)..(8): 2'-O-methyladenosine
  modified_base (9)..(9): 2'-deoxy-2'-fluoroguanosine
  modified_base (10)..(10): cm
  modified_base (11)..(11): 2'-O-methyladenosine
  modified_base (12)..(12): 2'-deoxy-2'-fluorouridine
  modified_base (13)..(13): um
  modified_base (14)..(14): 2'-deoxy-2'-fluorouridine
  modified_base (15)..(15): gm
  modified_base (16)..(16): 2'-deoxy-2'-fluoroguanosine
  modified_base (17)..(17): gm
  modified_base (18)..(18): 2'-deoxy-2'-fluoroguanosine
  modified_base (19)..(19): 2'-O-methyladenosine
  modified_base (20)..(20): 2'-deoxy-2'-fluorocytidine
  modified_base (21)..(21): um
  modified_base (22)..(22): 2'-deoxy-2'-fluorouridine
  misc_feature (22)..(23): 5'-phosphonothioate
  modified_base (23)..(23): cm
uccuugaagcauuuggggacuuc

SEQ ID NO: 6698 - RNA, 23 nt, Artificial Sequence
  siRNA antisense strand against b2GPI
  modified_base (1)..(1): 2'-deoxy-2'-fluorouridine
  modified_base (2)..(2): um
  misc_feature (2)..(3): 5'-phosphonothioate
  modified_base (3)..(3): 2'-deoxy-2'-fluorocytidine
  modified_base (4)..(4): cm
  modified_base (5)..(5): 2'-deoxy-2'-fluorouridine
  modified_base (6)..(6): um
  modified_base (7)..(7): 2'-deoxy-2'-fluoroguanosine
  modified_base (8)..(8): 2'-O-methyladenosine
  modified_base (9)..(9): 2'-deoxy-2'-fluoroadenosine
  modified_base (10)..(10): gm
  modified_base (11)..(11): cm
  modified_base (12)..(12): 2'-deoxy-2'-fluoroadenosine
  modified_base (13)..(13): um
  modified_base (14)..(14): 2'-deoxy-2'-fluorouridine
  modified_base (15)..(15): um
  modified_base (16)..(16): 2'-deoxy-2'-fluoroguanosine
  modified_base (17)..(17): gm
  modified_base (18)..(18): 2'-deoxy-2'-fluoroguanosine
  modified_base (19)..(19): gm
  modified_base (20)..(20): 2'-deoxy-2'-fluoroadenosine
  modified_base (21)..(21): cm
  modified_base (22)..(22): 2'-deoxy-2'-fluorouridine
  misc_feature (22)..(23): 5'-phosphonothioate
  modified_base (23)..(23): um
uuccuugaagcauuuggggacuu

SEQ ID NO: 6699 - RNA, 23 nt, Artificial Sequence
  siRNA antisense strand against b2GPI
  modified_base (1)..(1): 2'-deoxy-2'-fluoroguanosine
  modified_base (2)..(2): um
  misc_feature (2)..(3): 5'-phosphonothioate
  modified_base (3)..(3): 2'-deoxy-2'-fluorouridine
  modified_base (4)..(4): cm
  modified_base (5)..(5): 2'-deoxy-2'-fluorocytidine
  modified_base (6)..(6): um
  modified_base (7)..(7): 2'-deoxy-2'-fluorouridine
  modified_base (8)..(8): gm
  modified_base (9)..(9): 2'-deoxy-2'-fluoroadenosine
  modified_base (10)..(10): 2'-O-methyladenosine
  modified_base (11)..(11): gm
  modified_base (12)..(12): 2'-deoxy-2'-fluorocytidine
  modified_base (13)..(13): 2'-O-methyladenosine
  modified_base (14)..(14): 2'-deoxy-2'-fluorouridine
  modified_base (15)..(15): um
  modified_base (16)..(16): 2'-deoxy-2'-fluorouridine
  modified_base (17)..(17): gm
  modified_base (18)..(18): 2'-deoxy-2'-fluoroguanosine
  modified_base (19)..(19): gm
  modified_base (20)..(20): 2'-deoxy-2'-fluoroguanosine
  modified_base (21)..(21): 2'-O-methyladenosine
  modified_base (22)..(22): 2'-deoxy-2'-fluorocytidine
  misc_feature (22)..(23): 5'-phosphonothioate
  modified_base (23)..(23): um
guuccuugaagcauuuggggacu

SEQ ID NO: 6700 - RNA, 23 nt, Artificial Sequence
  siRNA antisense strand against b2GPI
  modified_base (1)..(1): 2'-deoxy-2'-fluorouridine
  modified_base (2)..(2): gm
  misc_feature (2)..(3): 5'-phosphonothioate
  modified_base (3)..(3): 2'-deoxy-2'-fluorouridine
  modified_base (4)..(4): um
  modified_base (5)..(5): 2'-deoxy-2'-fluorocytidine
  modified_base (6)..(6): cm
  modified_base (7)..(7): 2'-deoxy-2'-fluorouridine
  modified_base (8)..(8): um
  modified_base (9)..(9): 2'-deoxy-2'-fluoroguanosine
  modified_base (10)..(10): 2'-O-methyladenosine
  modified_base (11)..(11): 2'-O-methyladenosine
  modified_base (12)..(12): 2'-deoxy-2'-fluoroguanosine
  modified_base (13)..(13): cm
  modified_base (14)..(14): 2'-deoxy-2'-fluoroadenosine
  modified_base (15)..(15): um
  modified_base (16)..(16): 2'-deoxy-2'-fluorouridine
  modified_base (17)..(17): um
  modified_base (18)..(18): 2'-deoxy-2'-fluoroguanosine
  modified_base (19)..(19): gm
  modified_base (20)..(20): 2'-deoxy-2'-fluoroguanosine
  modified_base (21)..(21): gm
  modified_base (22)..(22): 2'-deoxy-2'-fluoroadenosine
  misc_feature (22)..(23): 5'-phosphonothioate
  modified_base (23)..(23): cm
uguuccuugaagcauuuggggac

SEQ ID NO: 6701 - RNA, 23 nt, Artificial Sequence
  siRNA antisense strand against b2GPI
  modified_base (1)..(1): 2'-deoxy-2'-fluoroguanosine
  modified_base (2)..(2): um
  misc_feature (2)..(3): 5'-phosphonothioate
  modified_base (3)..(3): 2'-deoxy-2'-fluoroguanosine
  modified_base (4)..(4): um
  modified_base (5)..(5): 2'-deoxy-2'-fluorouridine
  modified_base (6)..(6): cm
  modified_base (7)..(7): 2'-deoxy-2'-fluorocytidine
  modified_base (8)..(8): um
  modified_base (9)..(9): 2'-deoxy-2'-fluorouridine
  modified_base (10)..(10): gm
  modified_base (11)..(11): 2'-O-methyladenosine
  modified_base (12)..(12): 2'-deoxy-2'-fluoroadenosine
  modified_base (13)..(13): gm
  modified_base (14)..(14): 2'-deoxy-2'-fluorocytidine
  modified_base (15)..(15): 2'-O-methyladenosine
  modified_base (16)..(16): 2'-deoxy-2'-fluorouridine
  modified_base (17)..(17): um
  modified_base (18)..(18): 2'-deoxy-2'-fluorouridine
  modified_base (19)..(19): gm
  modified_base (20)..(20): 2'-deoxy-2'-fluoroguanosine
  modified_base (21)..(21): gm
  modified_base (22)..(22): 2'-deoxy-2'-fluoroguanosine
  misc_feature (22)..(23): 5'-phosphonothioate
  modified_base (23)..(23): 2'-O-methyladenosine
guguuccuugaagcauuugggga

SEQ ID NO: 6702 - RNA, 23 nt, Artificial Sequence
  siRNA antisense strand against b2GPI
  modified_base (1)..(1): 2'-deoxy-2'-fluorouridine
  modified_base (2)..(2): gm
  misc_feature (2)..(3): 5'-phosphonothioate
  modified_base (3)..(3): 2'-deoxy-2'-fluorouridine
  modified_base (4)..(4): gm
  modified_base (5)..(5): 2'-deoxy-2'-fluorouridine
  modified_base (6)..(6): um
  modified_base (7)..(7): 2'-deoxy-2'-fluorocytidine
  modified_base (8)..(8): cm
  modified_base (9)..(9): 2'-deoxy-2'-fluorouridine
  modified_base (10)..(10): um
  modified_base (11)..(11): gm
  modified_base (12)..(12): 2'-deoxy-2'-fluoroadenosine
  modified_base (13)..(13): 2'-O-methyladenosine
  modified_base (14)..(14): 2'-deoxy-2'-fluoroguanosine
  modified_base (15)..(15): cm
  modified_base (16)..(16): 2'-deoxy-2'-fluoroadenosine
  modified_base (17)..(17): um
  modified_base (18)..(18): 2'-deoxy-2'-fluorouridine
  modified_base (19)..(19): um
  modified_base (20)..(20): 2'-deoxy-2'-fluoroguanosine
  modified_base (21)..(21): gm
  modified_base (22)..(22): 2'-deoxy-2'-fluoroguanosine
  misc_feature (22)..(23): 5'-phosphonothioate
  modified_base (23)..(23): gm
uguguuccuugaagcauuugggg

SEQ ID NO: 6703 - RNA, 23 nt, Artificial Sequence
  siRNA antisense strand against b2GPI
  modified_base (1)..(1): 2'-deoxy-2'-fluorocytidine
  modified_base (2)..(2): um
  misc_feature (2)..(3): 5'-phosphonothioate
  modified_base (3)..(3): 2'-deoxy-2'-fluoroguanosine
  modified_base (4)..(4): um
  modified_base (5)..(5): 2'-deoxy-2'-fluoroguanosine
  modified_base (6)..(6): um
  modified_base (7)..(7): 2'-deoxy-2'-fluorouridine
  modified_base (8)..(8): cm
  modified_base (9)..(9): 2'-deoxy-2'-fluorocytidine
  modified_base (10)..(10): um
  modified_base (11)..(11): um
  modified_base (12)..(12): 2'-deoxy-2'-fluoroguanosine
  modified_base (13)..(13): 2'-O-methyladenosine
  modified_base (14)..(14): 2'-deoxy-2'-fluoroadenosine
  modified_base (15)..(15): gm
  modified_base (16)..(16): 2'-deoxy-2'-fluorocytidine
  modified_base (17)..(17): 2'-O-methyladenosine
  modified_base (18)..(18): 2'-deoxy-2'-fluorouridine
  modified_base (19)..(19): um
  modified_base (20)..(20): 2'-deoxy-2'-fluorouridine
  modified_base (21)..(21): gm
  modified_base (22)..(22): 2'-deoxy-2'-fluoroguanosine
  misc_feature (22)..(23): 5'-phosphonothioate
  modified_base (23)..(23): gm
cuguguuccuugaagcauuuggg

SEQ ID NO: 6704 - RNA, 23 nt, Artificial Sequence
  siRNA antisense strand against b2GPI
  modified_base (1)..(1): 2'-deoxy-2'-fluoroadenosine
  modified_base (2)..(2): cm
  misc_feature (2)..(3): 5'-phosphonothioate
  modified_base (3)..(3): 2'-deoxy-2'-fluorouridine
  modified_base (4)..(4): gm
  modified_base (5)..(5): 2'-deoxy-2'-fluorouridine
  modified_base (6)..(6): gm
  modified_base (7)..(7): 2'-deoxy-2'-fluorouridine
  modified_base (8)..(8): um
  modified_base (9)..(9): 2'-deoxy-2'-fluorocytidine
  modified_base (10)..(10): cm
  modified_base (11)..(11): um
  modified_base (12)..(12): 2'-deoxy-2'-fluorouridine
  modified_base (13)..(13): gm
  modified_base (14)..(14): 2'-deoxy-2'-fluoroadenosine
  modified_base (15)..(15): 2'-O-methyladenosine
  modified_base (16)..(16): 2'-deoxy-2'-fluoroguanosine
  modified_base (17)..(17): cm
  modified_base (18)..(18): 2'-deoxy-2'-fluoroadenosine
  modified_base (19)..(19): um
  modified_base (20)..(20): 2'-deoxy-2'-fluorouridine
  modified_base (21)..(21): um
  modified_base (22)..(22): 2'-deoxy-2'-fluoroguanosine
  misc_feature (22)..(23): 5'-phosphonothioate
  modified_base (23)..(23): gm
acuguguuccuugaagcauuugg

SEQ ID NO: 6705 - RNA, 23 nt, Artificial Sequence
  siRNA antisense strand against b2GPI
  modified_base (1)..(1): 2'-deoxy-2'-fluoroadenosine
  modified_base (2)..(2): 2'-O-methyladenosine
  misc_feature (2)..(3): 5'-phosphonothioate
  modified_base (3)..(3): 2'-deoxy-2'-fluorocytidine
  modified_base (4)..(4): um
  modified_base (5)..(5): 2'-deoxy-2'-fluoroguanosine
  modified_base (6)..(6): um
  modified_base (7)..(7): 2'-deoxy-2'-fluoroguanosine
  modified_base (8)..(8): um
  modified_base (9)..(9): 2'-deoxy-2'-fluorouridine
  modified_base (10)..(10): cm
  modified_base (11)..(11): cm
  modified_base (12)..(12): 2'-deoxy-2'-fluorouridine
  modified_base (13)..(13): um
  modified_base (14)..(14): 2'-deoxy-2'-fluoroguanosine
  modified_base (15)..(15): 2'-O-methyladenosine
  modified_base (16)..(16): 2'-deoxy-2'-fluoroadenosine
  modified_base (17)..(17): gm
  modified_base (18)..(18): 2'-deoxy-2'-fluorocytidine
  modified_base (19)..(19): 2'-O-methyladenosine
  modified_base (20)..(20): 2'-deoxy-2'-fluorouridine
  modified_base (21)..(21): um
  modified_base (22)..(22): 2'-deoxy-2'-fluorouridine
  misc_feature (22)..(23): 5'-phosphonothioate
  modified_base (23)..(23): gm
aacuguguuccuugaagcauuug

SEQ ID NO: 6706 - RNA, 23 nt, Artificial Sequence
  siRNA antisense strand against b2GPI
  modified_base (1)..(1): 2'-deoxy-2'-fluoroguanosine
  modified_base (2)..(2): 2'-O-methyladenosine
  misc_feature (2)..(3): 5'-phosphonothioate
  modified_base (3)..(3): 2'-deoxy-2'-fluoroadenosine
  modified_base (4)..(4): cm
  modified_base (5)..(5): 2'-deoxy-2'-fluorouridine
  modified_base (6)..(6): gm
  modified_base (7)..(7): 2'-deoxy-2'-fluorouridine
  modified_base (8)..(8): gm
  modified_base (9)..(9): 2'-deoxy-2'-fluorouridine
  modified_base (10)..(10): um
  modified_base (11)..(11): cm
  modified_base (12)..(12): 2'-deoxy-2'-fluorocytidine
  modified_base (13)..(13): um
  modified_base (14)..(14): 2'-deoxy-2'-fluorouridine
  modified_base (15)..(15): gm
  modified_base (16)..(16): 2'-deoxy-2'-fluoroadenosine
  modified_base (17)..(17): 2'-O-methyladenosine
  modified_base (18)..(18): 2'-deoxy-2'-fluoroguanosine
  modified_base (19)..(19): cm
  modified_base (20)..(20): 2'-deoxy-2'-fluoroadenosine
  modified_base (21)..(21): um
  modified_base (22)..(22): 2'-deoxy-2'-fluorouridine
  misc_feature (22)..(23): 5'-phosphonothioate
  modified_base (23)..(23): um
gaacuguguuccuugaagcauuu

SEQ ID NO: 6707 - RNA, 23 nt, Artificial Sequence
  siRNA antisense strand against b2GPI
  modified_base (1)..(1): 2'-deoxy-2'-fluoroadenosine
  modified_base (2)..(2): gm
  misc_feature (2)..(3): 5'-phosphonothioate
  modified_base (3)..(3): 2'-deoxy-2'-fluoroadenosine
  modified_base (4)..(4): 2'-O-methyladenosine
  modified_base (5)..(5): 2'-deoxy-2'-fluorocytidine
  modified_base (6)..(6): um
  modified_base (7)..(7): 2'-deoxy-2'-fluoroguanosine
  modified_base (8)..(8): um
  modified_base (9)..(9): 2'-deoxy-2'-fluoroguanosine
  modified_base (10)..(10): um
  modified_base (11)..(11): um
  modified_base (12)..(12): 2'-deoxy-2'-fluorocytidine
  modified_base (13)..(13): cm
  modified_base (14)..(14): 2'-deoxy-2'-fluorouridine
  modified_base (15)..(15): um
  modified_base (16)..(16): 2'-deoxy-2'-fluoroguanosine
  modified_base (17)..(17): 2'-O-methyladenosine
  modified_base (18)..(18): 2'-deoxy-2'-fluoroadenosine
  modified_base (19)..(19): gm
  modified_base (20)..(20): 2'-deoxy-2'-fluorocytidine
  modified_base (21)..(21): 2'-O-methyladenosine
  modified_base (22)..(22): 2'-deoxy-2'-fluorouridine
  misc_feature (22)..(23): 5'-phosphonothioate
  modified_base (23)..(23): um
agaacuguguuccuugaagcauu

SEQ ID NO: 6708 - RNA, 23 nt, Artificial Sequence
  siRNA antisense strand against b2GPI
  modified_base (1)..(1): 2'-deoxy-2'-fluoroadenosine
  modified_base (2)..(2): gm
  misc_feature (2)..(3): 5'-phosphonothioate
  modified_base (3)..(3): 2'-deoxy-2'-fluoroadenosine
  modified_base (4)..(4): gm
  modified_base (5)..(5): 2'-deoxy-2'-fluoroadenosine
  modified_base (6)..(6): 2'-O-methyladenosine
  modified_base (7)..(7): 2'-deoxy-2'-fluorocytidine
  modified_base (8)..(8): um
  modified_base (9)..(9): 2'-deoxy-2'-fluoroguanosine
  modified_base (10)..(10): um
  modified_base (11)..(11): gm
  modified_base (12)..(12): 2'-deoxy-2'-fluorouridine
  modified_base (13)..(13): um
  modified_base (14)..(14): 2'-deoxy-2'-fluorocytidine
  modified_base (15)..(15): cm
  modified_base (16)..(16): 2'-deoxy-2'-fluorouridine
  modified_base (17)..(17): um
  modified_base (18)..(18): 2'-deoxy-2'-fluoroguanosine
  modified_base (19)..(19): 2'-O-methyladenosine
  modified_base (20)..(20): 2'-deoxy-2'-fluoroadenosine
  modified_base (21)..(21): gm
  modified_base (22)..(22): 2'-deoxy-2'-fluorocytidine
  misc_feature (22)..(23): 5'-phosphonothioate
  modified_base (23)..(23): 2'-O-methyladenosine
agagaacuguguuccuugaagca

SEQ ID NO: 6709 - RNA, 23 nt, Artificial Sequence
  siRNA antisense strand against b2GPI
  modified_base (1)..(1): 2'-deoxy-2'-fluorocytidine
  modified_base (2)..(2): 2'-O-methyladenosine
  misc_feature (2)..(3): 5'-phosphonothioate
  modified_base (3)..(3): 2'-deoxy-2'-fluoroguanosine
  modified_base (4)..(4): 2'-O-methyladenosine
  modified_base (5)..(5): 2'-deoxy-2'-fluoroguanosine
  modified_base (6)..(6): 2'-O-methyladenosine
  modified_base (7)..(7): 2'-deoxy-2'-fluoroadenosine
  modified_base (8)..(8): cm
  modified_base (9)..(9): 2'-deoxy-2'-fluorouridine
  modified_base (10)..(10): gm
  modified_base (11)..(11): um
  modified_base (12)..(12): 2'-deoxy-2'-fluoroguanosine
  modified_base (13)..(13): um
  modified_base (14)..(14): 2'-deoxy-2'-fluorouridine
  modified_base (15)..(15): cm
  modified_base (16)..(16): 2'-deoxy-2'-fluorocytidine
  modified_base (17)..(17): um
  modified_base (18)..(18): 2'-deoxy-2'-fluorouridine
  modified_base (19)..(19): gm
  modified_base (20)..(20): 2'-deoxy-2'-fluoroadenosine
  modified_base (21)..(21): 2'-O-methyladenosine
  modified_base (22)..(22): 2'-deoxy-2'-fluoroguanosine
  misc_feature (22)..(23): 5'-phosphonothioate
  modified_base (23)..(23): cm
cagagaacuguguuccuugaagc

SEQ ID NO: 6710 - RNA, 23 nt, Artificial Sequence
  siRNA antisense strand against b2GPI
  modified_base (1)..(1): 2'-deoxy-2'-fluoroadenosine
  modified_base (2)..(2): gm
  misc_feature (2)..(3): 5'-phosphonothioate
  modified_base (3)..(3): 2'-deoxy-2'-fluorocytidine
  modified_base (4)..(4): cm
  modified_base (5)..(5): 2'-deoxy-2'-fluoroadenosine
  modified_base (6)..(6): gm
  modified_base (7)..(7): 2'-deoxy-2'-fluoroadenosine
  modified_base (8)..(8): gm
  modified_base (9)..(9): 2'-deoxy-2'-fluoroadenosine
  modified_base (10)..(10): 2'-O-methyladenosine
  modified_base (11)..(11): cm
  modified_base (12)..(12): 2'-deoxy-2'-fluorouridine
  modified_base (13)..(13): gm
  modified_base (14)..(14): 2'-deoxy-2'-fluorouridine
  modified_base (15)..(15): gm
  modified_base (16)..(16): 2'-deoxy-2'-fluorouridine
  modified_base (17)..(17): um
  modified_base (18)..(18): 2'-deoxy-2'-fluorocytidine
  modified_base (19)..(19): cm
  modified_base (20)..(20): 2'-deoxy-2'-fluorouridine
  modified_base (21)..(21): um
  modified_base (22)..(22): 2'-deoxy-2'-fluoroguanosine
  misc_feature (22)..(23): 5'-phosphonothioate
  modified_base (23)..(23): 2'-O-methyladenosine
agccagagaacuguguuccuuga

SEQ ID NO: 6711 - RNA, 23 nt, Artificial Sequence
  siRNA antisense strand against b2GPI
  modified_base (1)..(1): 2'-deoxy-2'-fluoroadenosine
  modified_base (2)..(2): 2'-O-methyladenosine
  misc_feature (2)..(3): 5'-phosphonothioate
  modified_base (3)..(3): 2'-deoxy-2'-fluoroguanosine
  modified_base (4)..(4): cm
  modified_base (5)..(5): 2'-deoxy-2'-fluorocytidine
  modified_base (6)..(6): 2'-O-methyladenosine
  modified_base (7)..(7): 2'-deoxy-2'-fluoroguanosine
  modified_base (8)..(8): 2'-O-methyladenosine
  modified_base (9)..(9): 2'-deoxy-2'-fluoroguanosine
  modified_base (10)..(10): 2'-O-methyladenosine
  modified_base (11)..(11): 2'-O-methyladenosine
  modified_base (12)..(12): 2'-deoxy-2'-fluorocytidine
  modified_base (13)..(13): um
  modified_base (14)..(14): 2'-deoxy-2'-fluoroguanosine
  modified_base (15)..(15): um
  modified_base (16)..(16): 2'-deoxy-2'-fluoroguanosine
  modified_base (17)..(17): um
  modified_base (18)..(18): 2'-deoxy-2'-fluorouridine
  modified_base (19)..(19): cm
  modified_base (20)..(20): 2'-deoxy-2'-fluorocytidine
  modified_base (21)..(21): um
  modified_base (22)..(22): 2'-deoxy-2'-fluorouridine
  misc_feature (22)..(23): 5'-phosphonothioate
  modified_base (23)..(23): gm
aagccagagaacuguguuccuug

SEQ ID NO: 6712 - RNA, 23 nt, Artificial Sequence
  siRNA antisense strand against b2GPI
  modified_base (1)..(1): 2'-deoxy-2'-fluoroadenosine
  modified_base (2)..(2): 2'-O-methyladenosine
  misc_feature (2)..(3): 5'-phosphonothioate
  modified_base (3)..(3): 2'-deoxy-2'-fluoroadenosine
  modified_base (4)..(4): gm
  modified_base (5)..(5): 2'-deoxy-2'-fluorocytidine
  modified_base (6)..(6): cm
  modified_base (7)..(7): 2'-deoxy-2'-fluoroadenosine
  modified_base (8)..(8): gm
  modified_base (9)..(9): 2'-deoxy-2'-fluoroadenosine
  modified_base (10)..(10): gm
  modified_base (11)..(11): 2'-O-methyladenosine
  modified_base (12)..(12): 2'-deoxy-2'-fluoroadenosine
  modified_base (13)..(13): cm
  modified_base (14)..(14): 2'-deoxy-2'-fluorouridine
  modified_base (15)..(15): gm
  modified_base (16)..(16): 2'-deoxy-2'-fluorouridine
  modified_base (17)..(17): gm
  modified_base (18)..(18): 2'-deoxy-2'-fluorouridine
  modified_base (19)..(19): um
  modified_base (20)..(20): 2'-deoxy-2'-fluorocytidine
  modified_base (21)..(21): cm
  modified_base (22)..(22): 2'-deoxy-2'-fluorouridine
  misc_feature (22)..(23): 5'-phosphonothioate
  modified_base (23)..(23): um
aaagccagagaacuguguuccuu

SEQ ID NO: 6713 - RNA, 23 nt, Artificial Sequence
  siRNA antisense strand against b2GPI
  modified_base (1)..(1): 2'-deoxy-2'-fluoroadenosine
  modified_base (2)..(2): 2'-O-methyladenosine
  misc_feature (2)..(3): 5'-phosphonothioate
  modified_base (3)..(3): 2'-deoxy-2'-fluoroadenosine
  modified_base (4)..(4): 2'-O-methyladenosine
  modified_base (5)..(5): 2'-deoxy-2'-fluoroguanosine
  modified_base (6)..(6): cm
  modified_base (7)..(7): 2'-deoxy-2'-fluorocytidine
  modified_base (8)..(8): 2'-O-methyladenosine
  modified_base (9)..(9): 2'-deoxy-2'-fluoroguanosine
  modified_base (10)..(10): 2'-O-methyladenosine
  modified_base (11)..(11): gm
  modified_base (12)..(12): 2'-deoxy-2'-fluoroadenosine
  modified_base (13)..(13): 2'-O-methyladenosine
  modified_base (14)..(14): 2'-deoxy-2'-fluorocytidine
  modified_base (15)..(15): um
  modified_base (16)..(16): 2'-deoxy-2'-fluoroguanosine
  modified_base (17)..(17): um
  modified_base (18)..(18): 2'-deoxy-2'-fluoroguanosine
  modified_base (19)..(19): um
  modified_base (20)..(20): 2'-deoxy-2'-fluorouridine
  modified_base (21)..(21): cm
  modified_base (22)..(22): 2'-deoxy-2'-fluorocytidine
  misc_feature (22)..(23): 5'-phosphonothioate
  modified_base (23)..(23): um
aaaagccagagaacuguguuccu

SEQ ID NO: 6714 - RNA, 23 nt, Artificial Sequence
  siRNA antisense strand against b2GPI
  modified_base (1)..(1): 2'-deoxy-2'-fluoroadenosine
  modified_base (2)..(2): 2'-O-methyladenosine
  misc_feature (2)..(3): 5'-phosphonothioate
  modified_base (3)..(3): 2'-deoxy-2'-fluoroadenosine
  modified_base (4)..(4): 2'-O-methyladenosine
  modified_base (5)..(5): 2'-deoxy-2'-fluoroadenosine
  modified_base (6)..(6): gm
  modified_base (7)..(7): 2'-deoxy-2'-fluorocytidine
  modified_base (8)..(8): cm
  modified_base (9)..(9): 2'-deoxy-2'-fluoroadenosine
  modified_base (10)..(10): gm
  modified_base (11)..(11): 2'-O-methyladenosine
  modified_base (12)..(12): 2'-deoxy-2'-fluoroguanosine
  modified_base (13)..(13): 2'-O-methyladenosine
  modified_base (14)..(14): 2'-deoxy-2'-fluoroadenosine
  modified_base (15)..(15): cm
  modified_base (16)..(16): 2'-deoxy-2'-fluorouridine
  modified_base (17)..(17): gm
  modified_base (18)..(18): 2'-deoxy-2'-fluorouridine
  modified_base (19)..(19): gm
  modified_base (20)..(20): 2'-deoxy-2'-fluorouridine
  modified_base (21)..(21): um
  modified_base (22)..(22): 2'-deoxy-2'-fluorocytidine
  misc_feature (22)..(23): 5'-phosphonothioate
  modified_base (23)..(23): cm
aaaaagccagagaacuguguucc

SEQ ID NO: 6715 - RNA, 23 nt, Artificial Sequence
  siRNA antisense strand against b2GPI
  modified_base (1)..(1): 2'-deoxy-2'-fluorocytidine
  modified_base (2)..(2): 2'-O-methyladenosine
  misc_feature (2)..(3): 5'-phosphonothioate
  modified_base (3)..(3): 2'-deoxy-2'-fluoroadenosine
  modified_base (4)..(4): 2'-O-methyladenosine
  modified_base (5)..(5): 2'-deoxy-2'-fluoroadenosine
  modified_base (6)..(6): 2'-O-methyladenosine
  modified_base (7)..(7): 2'-deoxy-2'-fluoroguanosine
  modified_base (8)..(8): cm
  modified_base (9)..(9): 2'-deoxy-2'-fluorocytidine
  modified_base (10)..(10): 2'-O-methyladenosine
  modified_base (11)..(11): gm
  modified_base (12)..(12): 2'-deoxy-2'-fluoroadenosine
  modified_base (13)..(13): gm
  modified_base (14)..(14): 2'-deoxy-2'-fluoroadenosine
  modified_base (15)..(15): 2'-O-methyladenosine
  modified_base (16)..(16): 2'-deoxy-2'-fluorocytidine
  modified_base (17)..(17): um
  modified_base (18)..(18): 2'-deoxy-2'-fluoroguanosine
  modified_base (19)..(19): um
  modified_base (20)..(20): 2'-deoxy-2'-fluoroguanosine
  modified_base (21)..(21): um
  modified_base (22)..(22): 2'-deoxy-2'-fluorouridine
  misc_feature (22)..(23): 5'-phosphonothioate
  modified_base (23)..(23): cm
caaaaagccagagaacuguguuc

SEQ ID NO: 6716 - RNA, 23 nt, Artificial Sequence
  siRNA antisense strand against b2GPI
  modified_base (1)..(1): 2'-deoxy-2'-fluorocytidine
  modified_base (2)..(2): cm
  misc_feature (2)..(3): 5'-phosphonothioate
  modified_base (3)..(3): 2'-deoxy-2'-fluoroadenosine
  modified_base (4)..(4): 2'-O-methyladenosine
  modified_base (5)..(5): 2'-deoxy-2'-fluoroadenosine
  modified_base (6)..(6): 2'-O-methyladenosine
  modified_base (7)..(7): 2'-deoxy-2'-fluoroadenosine
  modified_base (8)..(8): gm
  modified_base (9)..(9): 2'-deoxy-2'-fluorocytidine
  modified_base (10)..(10): cm
  modified_base (11)..(11): 2'-O-methyladenosine
  modified_base (12)..(12): 2'-deoxy-2'-fluoroguanosine
  modified_base (13)..(13): 2'-O-methyladenosine
  modified_base (14)..(14): 2'-deoxy-2'-fluoroguanosine
  modified_base (15)..(15): 2'-O-methyladenosine
  modified_base (16)..(16): 2'-deoxy-2'-fluoroadenosine
  modified_base (17)..(17): cm
  modified_base (18)..(18): 2'-deoxy-2'-fluorouridine
  modified_base (19)..(19): gm
  modified_base (20)..(20): 2'-deoxy-2'-fluorouridine
  modified_base (21)..(21): gm
  modified_base (22)..(22): 2'-deoxy-2'-fluorouridine
  misc_feature (22)..(23): 5'-phosphonothioate
  modified_base (23)..(23): um
ccaaaaagccagagaacuguguu

SEQ ID NO: 6717 - RNA, 23 nt, Artificial Sequence
  siRNA antisense strand against b2GPI
  modified_base (1)..(1): 2'-deoxy-2'-fluorouridine
  modified_base (2)..(2): cm
  misc_feature (2)..(3): 5'-phosphonothioate
  modified_base (3)..(3): 2'-deoxy-2'-fluorocytidine
  modified_base (4)..(4): 2'-O-methyladenosine
  modified_base (5)..(5): 2'-deoxy-2'-fluoroadenosine
  modified_base (6)..(6): 2'-O-methyladenosine
  modified_base (7)..(7): 2'-deoxy-2'-fluoroadenosine
  modified_base (8)..(8): 2'-O-methyladenosine
  modified_base (9)..(9): 2'-deoxy-2'-fluoroguanosine
  modified_base (10)..(10): cm
  modified_base (11)..(11): cm
  modified_base (12)..(12): 2'-deoxy-2'-fluoroadenosine
  modified_base (13)..(13): gm
  modified_base (14)..(14): 2'-deoxy-2'-fluoroadenosine
  modified_base (15)..(15): gm
  modified_base (16)..(16): 2'-deoxy-2'-fluoroadenosine
  modified_base (17)..(17): 2'-O-methyladenosine
  modified_base (18)..(18): 2'-deoxy-2'-fluorocytidine
  modified_base (19)..(19): um
  modified_base (20)..(20): 2'-deoxy-2'-fluoroguanosine
  modified_base (21)..(21): um
  modified_base (22)..(22): 2'-deoxy-2'-fluoroguanosine
  misc_feature (22)..(23): 5'-phosphonothioate
  modified_base (23)..(23): um
uccaaaaagccagagaacugugu

SEQ ID NO: 6718 - RNA, 23 nt, Artificial Sequence
  siRNA antisense strand against b2GPI
  modified_base (1)..(1): 2'-deoxy-2'-fluorouridine
  modified_base (2)..(2): um
  misc_feature (2)..(3): 5'-phosphonothioate
  modified_base (3)..(3): 2'-deoxy-2'-fluorocytidine
  modified_base (4)..(4): cm
  modified_base (5)..(5): 2'-deoxy-2'-fluoroadenosine
  modified_base (6)..(6): 2'-O-methyladenosine
  modified_base (7)..(7): 2'-deoxy-2'-fluoroadenosine
  modified_base (8)..(8): 2'-O-methyladenosine
  modified_base (9)..(9): 2'-deoxy-2'-fluoroadenosine
  modified_base (10)..(10): gm
  modified_base (11)..(11): cm
  modified_base (12)..(12): 2'-deoxy-2'-fluorocytidine
  modified_base (13)..(13): 2'-O-methyladenosine
  modified_base (14)..(14): 2'-deoxy-2'-fluoroguanosine
  modified_base (15)..(15): 2'-O-methyladenosine
  modified_base (16)..(16): 2'-deoxy-2'-fluoroguanosine
  modified_base (17)..(17): 2'-O-methyladenosine
  modified_base (18)..(18): 2'-deoxy-2'-fluoroadenosine
  modified_base (19)..(19): cm
  modified_base (20)..(20): 2'-deoxy-2'-fluorouridine
  modified_base (21)..(21): gm
  modified_base (22)..(22): 2'-deoxy-2'-fluorouridine
  misc_feature (22)..(23): 5'-phosphonothioate
  modified_base (23)..(23): gm
uuccaaaaagccagagaacugug

SEQ ID NO: 6719 - RNA, 23 nt, Artificial Sequence
  siRNA antisense strand against b2GPI
  modified_base (1)..(1): 2'-deoxy-2'-fluorouridine
  modified_base (2)..(2): um
  misc_feature (2)..(3): 5'-phosphonothioate
  modified_base (3)..(3): 2'-deoxy-2'-fluorouridine
  modified_base (4)..(4): cm
  modified_base (5)..(5): 2'-deoxy-2'-fluorocytidine
  modified_base (6)..(6): 2'-O-methyladenosine
  modified_base (7)..(7): 2'-deoxy-2'-fluoroadenosine
  modified_base (8)..(8): 2'-O-methyladenosine
  modified_base (9)..(9): 2'-deoxy-2'-fluoroadenosine
  modified_base (10)..(10): 2'-O-methyladenosine
  modified_base (11)..(11): gm
  modified_base (12)..(12): 2'-deoxy-2'-fluorocytidine
  modified_base (13)..(13): cm
  modified_base (14)..(14): 2'-deoxy-2'-fluoroadenosine
  modified_base (15)..(15): gm
  modified_base (16)..(16): 2'-deoxy-2'-fluoroadenosine
  modified_base (17)..(17): gm
  modified_base (18)..(18): 2'-deoxy-2'-fluoroadenosine
  modified_base (19)..(19): 2'-O-methyladenosine
  modified_base (20)..(20): 2'-deoxy-2'-fluorocytidine
  modified_base (21)..(21): um
  modified_base (22)..(22): 2'-deoxy-2'-fluoroguanosine
  misc_feature (22)..(23): 5'-phosphonothioate
  modified_base (23)..(23): um
uuuccaaaaagccagagaacugu

SEQ ID NO: 6720 - RNA, 23 nt, Artificial Sequence
  siRNA antisense strand against b2GPI
  modified_base (1)..(1): 2'-deoxy-2'-fluorouridine
  modified_base (2)..(2): um
  misc_feature (2)..(3): 5'-phosphonothioate
  modified_base (3)..(3): 2'-deoxy-2'-fluorouridine
  modified_base (4)..(4): um
  modified_base (5)..(5): 2'-deoxy-2'-fluorocytidine
  modified_base (6)..(6): cm
  modified_base (7)..(7): 2'-deoxy-2'-fluoroadenosine
  modified_base (8)..(8): 2'-O-methyladenosine
  modified_base (9)..(9): 2'-deoxy-2'-fluoroadenosine
  modified_base (10)..(10): 2'-O-methyladenosine
  modified_base (11)..(11): 2'-O-methyladenosine
  modified_base (12)..(12): 2'-deoxy-2'-fluoroguanosine
  modified_base (13)..(13): cm
  modified_base (14)..(14): 2'-deoxy-2'-fluorocytidine
  modified_base (15)..(15): 2'-O-methyladenosine
  modified_base (16)..(16): 2'-deoxy-2'-fluoroguanosine
  modified_base (17)..(17): 2'-O-methyladenosine
  modified_base (18)..(18): 2'-deoxy-2'-fluoroguanosine
  modified_base (19)..(19): 2'-O-methyladenosine
  modified_base (20)..(20): 2'-deoxy-2'-fluoroadenosine
  modified_base (21)..(21): cm
  modified_base (22)..(22): 2'-deoxy-2'-fluorouridine
  misc_feature (22)..(23): 5'-phosphonothioate
  modified_base (23)..(23): gm
uuuuccaaaaagccagagaacug

SEQ ID NO: 6721 - RNA, 23 nt, Artificial Sequence
  siRNA antisense strand against b2GPI
  modified_base (1)..(1): 2'-deoxy-2'-fluorocytidine
  modified_base (2)..(2): 2'-O-methyladenosine
  misc_feature (2)..(3): 5'-phosphonothioate
  modified_base (3)..(3): 2'-deoxy-2'-fluoroguanosine
  modified_base (4)..(4): um
  modified_base (5)..(5): 2'-deoxy-2'-fluorouridine
  modified_base (6)..(6): um
  modified_base (7)..(7): 2'-deoxy-2'-fluorouridine
  modified_base (8)..(8): cm
  modified_base (9)..(9): 2'-deoxy-2'-fluorocytidine
  modified_base (10)..(10): 2'-O-methyladenosine
  modified_base (11)..(11): 2'-O-methyladenosine
  modified_base (12)..(12): 2'-deoxy-2'-fluoroadenosine
  modified_base (13)..(13): 2'-O-methyladenosine
  modified_base (14)..(14): 2'-deoxy-2'-fluoroadenosine
  modified_base (15)..(15): gm
  modified_base (16)..(16): 2'-deoxy-2'-fluorocytidine
  modified_base (17)..(17): cm
  modified_base (18)..(18): 2'-deoxy-2'-fluoroadenosine
  modified_base (19)..(19): gm
  modified_base (20)..(20): 2'-deoxy-2'-fluoroadenosine
  modified_base (21)..(21): gm
  modified_base (22)..(22): 2'-deoxy-2'-fluoroadenosine
  misc_feature (22)..(23): 5'-phosphonothioate
  modified_base (23)..(23): 2'-O-methyladenosine
caguuuuccaaaaagccagagaa

SEQ ID NO: 6722 - RNA, 23 nt, Artificial Sequence
  siRNA antisense strand against b2GPI
  modified_base (1)..(1): 2'-deoxy-2'-fluorouridine
  modified_base (2)..(2): cm
  misc_feature (2)..(3): 5'-phosphonothioate
  modified_base (3)..(3): 2'-deoxy-2'-fluoroadenosine
  modified_base (4)..(4): gm
  modified_base (5)..(5): 2'-deoxy-2'-fluorouridine
  modified_base (6)..(6): um
  modified_base (7)..(7): 2'-deoxy-2'-fluorouridine
  modified_base (8)..(8): um
  modified_base (9)..(9): 2'-deoxy-2'-fluorocytidine
  modified_base (10)..(10): cm
  modified_base (11)..(11): 2'-O-methyladenosine
  modified_base (12)..(12): 2'-deoxy-2'-fluoroadenosine
  modified_base (13)..(13): 2'-O-methyladenosine
  modified_base (14)..(14): 2'-deoxy-2'-fluoroadenosine
  modified_base (15)..(15): 2'-O-methyladenosine
  modified_base (16)..(16): 2'-deoxy-2'-fluoroguanosine
  modified_base (17)..(17): cm
  modified_base (18)..(18): 2'-deoxy-2'-fluorocytidine
  modified_base (19)..(19): 2'-O-methyladenosine
  modified_base (20)..(20): 2'-deoxy-2'-fluoroguanosine
  modified_base (21)..(21): 2'-O-methyladenosine
  modified_base (22)..(22): 2'-deoxy-2'-fluoroguanosine
  misc_feature (22)..(23): 5'-phosphonothioate
  modified_base (23)..(23): 2'-O-methyladenosine
ucaguuuuccaaaaagccagaga

SEQ ID NO: 6723 - RNA, 23 nt, Artificial Sequence
  siRNA antisense strand against b2GPI
  modified_base (1)..(1): 2'-deoxy-2'-fluoroadenosine
  modified_base (2)..(2): um
  misc_feature (2)..(3): 5'-phosphonothioate
  modified_base (3)..(3): 2'-deoxy-2'-fluorocytidine
  modified_base (4)..(4): 2'-O-methyladenosine
  modified_base (5)..(5): 2'-deoxy-2'-fluoroguanosine
  modified_base (6)..(6): um
  modified_base (7)..(7): 2'-deoxy-2'-fluorouridine
  modified_base (8)..(8): um
  modified_base (9)..(9): 2'-deoxy-2'-fluorouridine
  modified_base (10)..(10): cm
  modified_base (11)..(11): cm
  modified_base (12)..(12): 2'-deoxy-2'-fluoroadenosine
  modified_base (13)..(13): 2'-O-methyladenosine
  modified_base (14)..(14): 2'-deoxy-2'-fluoroadenosine
  modified_base (15)..(15): 2'-O-methyladenosine
  modified_base (16)..(16): 2'-deoxy-2'-fluoroadenosine
  modified_base (17)..(17): gm
  modified_base (18)..(18): 2'-deoxy-2'-fluorocytidine
  modified_base (19)..(19): cm
  modified_base (20)..(20): 2'-deoxy-2'-fluoroadenosine
  modified_base (21)..(21): gm
  modified_base (22)..(22): 2'-deoxy-2'-fluoroadenosine
  misc_feature (22)..(23): 5'-phosphonothioate
  modified_base (23)..(23): gm
aucaguuuuccaaaaagccagag

SEQ ID NO: 6724 - RNA, 23 nt, Artificial Sequence
  siRNA antisense strand against b2GPI
  modified_base (1)..(1): 2'-deoxy-2'-fluorocytidine
  modified_base (2)..(2): 2'-O-methyladenosine
  misc_feature (2)..(3): 5'-phosphonothioate
  modified_base (3)..(3): 2'-deoxy-2'-fluorouridine
  modified_base (4)..(4): cm
  modified_base (5)..(5): 2'-deoxy-2'-fluoroadenosine
  modified_base (6)..(6): gm
  modified_base (7)..(7): 2'-deoxy-2'-fluorouridine
  modified_base (8)..(8): um
  modified_base (9)..(9): 2'-deoxy-2'-fluorouridine
  modified_base (10)..(10): um
  modified_base (11)..(11): cm
  modified_base (12)..(12): 2'-deoxy-2'-fluorocytidine
  modified_base (13)..(13): 2'-O-methyladenosine
  modified_base (14)..(14): 2'-deoxy-2'-fluoroadenosine
  modified_base (15)..(15): 2'-O-methyladenosine
  modified_base (16)..(16): 2'-deoxy-2'-fluoroadenosine
  modified_base (17)..(17): 2'-O-methyladenosine
  modified_base (18)..(18): 2'-deoxy-2'-fluoroguanosine
  modified_base (19)..(19): cm
  modified_base (20)..(20): 2'-deoxy-2'-fluorocytidine
  modified_base (21)..(21): 2'-O-methyladenosine
  modified_base (22)..(22): 2'-deoxy-2'-fluoroguanosine
  misc_feature (22)..(23): 5'-phosphonothioate
  modified_base (23)..(23): 2'-O-methyladenosine
caucaguuuuccaaaaagccaga

SEQ ID NO: 6725 - RNA, 23 nt, Artificial Sequence
  siRNA antisense strand against b2GPI
  modified_base (1)..(1): 2'-deoxy-2'-fluorouridine
  modified_base (2)..(2): gm
  misc_feature (2)..(3): 5'-phosphonothioate
  modified_base (3)..(3): 2'-deoxy-2'-fluorocytidine
  modified_base (4)..(4): 2'-O-methyladenosine
  modified_base (5)..(5): 2'-deoxy-2'-fluorouridine
  modified_base (6)..(6): cm
  modified_base (7)..(7): 2'-deoxy-2'-fluoroadenosine
  modified_base (8)..(8): gm
  modified_base (9)..(9): 2'-deoxy-2'-fluorouridine
  modified_base (10)..(10): um
  modified_base (11)..(11): um
  modified_base (12)..(12): 2'-deoxy-2'-fluorouridine
  modified_base (13)..(13): cm
  modified_base (14)..(14): 2'-deoxy-2'-fluorocytidine
  modified_base (15)..(15): 2'-O-methyladenosine
  modified_base (16)..(16): 2'-deoxy-2'-fluoroadenosine
  modified_base (17)..(17): 2'-O-methyladenosine
  modified_base (18)..(18): 2'-deoxy-2'-fluoroadenosine
  modified_base (19)..(19): 2'-O-methyladenosine
  modified_base (20)..(20): 2'-deoxy-2'-fluoroguanosine
  modified_base (21)..(21): cm
  modified_base (22)..(22): 2'-deoxy-2'-fluorocytidine
  misc_feature (22)..(23): 5'-phosphonothioate
  modified_base (23)..(23): 2'-O-methyladenosine
ugcaucaguuuuccaaaaagcca

SEQ ID NO: 6726 - RNA, 23 nt, Artificial Sequence
  siRNA antisense strand against b2GPI
  modified_base (1)..(1): 2'-deoxy-2'-fluoroadenosine
  modified_base (2)..(2): um
  misc_feature (2)..(3): 5'-phosphonothioate
  modified_base (3)..(3): 2'-deoxy-2'-fluoroguanosine
  modified_base (4)..(4): cm
  modified_base (5)..(5): 2'-deoxy-2'-fluoroadenosine
  modified_base (6)..(6): um
  modified_base (7)..(7): 2'-deoxy-2'-fluorocytidine
  modified_base (8)..(8): 2'-O-methyladenosine
  modified_base (9)..(9): 2'-deoxy-2'-fluoroguanosine
  modified_base (10)..(10): um
  modified_base (11)..(11): um
  modified_base (12)..(12): 2'-deoxy-2'-fluorouridine
  modified_base (13)..(13): um
  modified_base (14)..(14): 2'-deoxy-2'-fluorocytidine
  modified_base (15)..(15): cm
  modified_base (16)..(16): 2'-deoxy-2'-fluoroadenosine
  modified_base (17)..(17): 2'-O-methyladenosine
  modified_base (18)..(18): 2'-deoxy-2'-fluoroadenosine
  modified_base (19)..(19): 2'-O-methyladenosine
  modified_base (20)..(20): 2'-deoxy-2'-fluoroadenosine
  modified_base (21)..(21): gm
  modified_base (22)..(22): 2'-deoxy-2'-fluorocytidine
  misc_feature (22)..(23): 5'-phosphonothioate
  modified_base (23)..(23): cm
augcaucaguuuuccaaaaagcc

SEQ ID NO: 6727 - RNA, 23 nt, Artificial Sequence
  siRNA antisense strand against b2GPI
  modified_base (1)..(1): 2'-deoxy-2'-fluorouridine
  modified_base (2)..(2): cm
  misc_feature (2)..(3): 5'-phosphonothioate
  modified_base (3)..(3): 2'-deoxy-2'-fluoroguanosine
  modified_base (4)..(4): gm
  modified_base (5)..(5): 2'-deoxy-2'-fluoroadenosine
  modified_base (6)..(6): um
  modified_base (7)..(7): 2'-deoxy-2'-fluoroguanosine
  modified_base (8)..(8): cm
  modified_base (9)..(9): 2'-deoxy-2'-fluoroadenosine
  modified_base (10)..(10): um
  modified_base (11)..(11): cm
  modified_base (12)..(12): 2'-deoxy-2'-fluoroadenosine
  modified_base (13)..(13): gm
  modified_base (14)..(14): 2'-deoxy-2'-fluorouridine
  modified_base (15)..(15): um
  modified_base (16)..(16): 2'-deoxy-2'-fluorouridine
  modified_base (17)..(17): um
  modified_base (18)..(18): 2'-deoxy-2'-fluorocytidine
  modified_base (19)..(19): cm
  modified_base (20)..(20): 2'-deoxy-2'-fluoroadenosine
  modified_base (21)..(21): 2'-O-methyladenosine
  modified_base (22)..(22): 2'-deoxy-2'-fluoroadenosine
  misc_feature (22)..(23): 5'-phosphonothioate
  modified_base (23)..(23): 2'-O-methyladenosine
ucggaugcaucaguuuuccaaaa

SEQ ID NO: 6728 - RNA, 23 nt, Artificial Sequence
  siRNA antisense strand against b2GPI
  modified_base (1)..(1): 2'-deoxy-2'-fluoroadenosine
  modified_base (2)..(2): um
  misc_feature (2)..(3): 5'-phosphonothioate
  modified_base (3)..(3): 2'-deoxy-2'-fluorocytidine
  modified_base (4)..(4): gm
  modified_base (5)..(5): 2'-deoxy-2'-fluoroguanosine
  modified_base (6)..(6): 2'-O-methyladenosine
  modified_base (7)..(7): 2'-deoxy-2'-fluorouridine
  modified_base (8)..(8): gm
  modified_base (9)..(9): 2'-deoxy-2'-fluorocytidine
  modified_base (10)..(10): 2'-O-methyladenosine
  modified_base (11)..(11): um
  modified_base (12)..(12): 2'-deoxy-2'-fluorocytidine
  modified_base (13)..(13): 2'-O-methyladenosine
  modified_base (14)..(14): 2'-deoxy-2'-fluoroguanosine
  modified_base (15)..(15): um
  modified_base (16)..(16): 2'-deoxy-2'-fluorouridine
  modified_base (17)..(17): um
  modified_base (18)..(18): 2'-deoxy-2'-fluorouridine
  modified_base (19)..(19): cm
  modified_base (20)..(20): 2'-deoxy-2'-fluorocytidine
  modified_base (21)..(21): 2'-O-methyladenosine
  modified_base (22)..(22): 2'-deoxy-2'-fluoroadenosine
  misc_feature (22)..(23): 5'-phosphonothioate
  modified_base (23)..(23): 2'-O-methyladenosine
aucggaugcaucaguuuuccaaa

SEQ ID NO: 6729 - RNA, 23 nt, Artificial Sequence
  siRNA antisense strand against b2GPI
  modified_base (1)..(1): 2'-deoxy-2'-fluorocytidine
  modified_base (2)..(2): 2'-O-methyladenosine
  misc_feature (2)..(3): 5'-phosphonothioate
  modified_base (3)..(3): 2'-deoxy-2'-fluorouridine
  modified_base (4)..(4): cm
  modified_base (5)..(5): 2'-deoxy-2'-fluoroguanosine
  modified_base (6)..(6): gm
  modified_base (7)..(7): 2'-deoxy-2'-fluoroadenosine
  modified_base (8)..(8): um
  modified_base (9)..(9): 2'-deoxy-2'-fluoroguanosine
  modified_base (10)..(10): cm
  modified_base (11)..(11): 2'-O-methyladenosine
  modified_base (12)..(12): 2'-deoxy-2'-fluorouridine
  modified_base (13)..(13): cm
  modified_base (14)..(14): 2'-deoxy-2'-fluoroadenosine
  modified_base (15)..(15): gm
  modified_base (16)..(16): 2'-deoxy-2'-fluorouridine
  modified_base (17)..(17): um
  modified_base (18)..(18): 2'-deoxy-2'-fluorouridine
  modified_base (19)..(19): um
  modified_base (20)..(20): 2'-deoxy-2'-fluorocytidine
  modified_base (21)..(21): cm
  modified_base (22)..(22): 2'-deoxy-2'-fluoroadenosine
  misc_feature (22)..(23): 5'-phosphonothioate
  modified_base (23)..(23): 2'-O-methyladenosine
caucggaugcaucaguuuuccaa

SEQ ID NO: 6730 - RNA, 23 nt, Artificial Sequence
  siRNA antisense strand against b2GPI
  modified_base (1)..(1): 2'-deoxy-2'-fluoroadenosine
  modified_base (2)..(2): cm
  misc_feature (2)..(3): 5'-phosphonothioate
  modified_base (3)..(3): 2'-deoxy-2'-fluoroadenosine
  modified_base (4)..(4): um
  modified_base (5)..(5): 2'-deoxy-2'-fluorocytidine
  modified_base (6)..(6): gm
  modified_base (7)..(7): 2'-deoxy-2'-fluoroguanosine
  modified_base (8)..(8): 2'-O-methyladenosine
  modified_base (9)..(9): 2'-deoxy-2'-fluorouridine
  modified_base (10)..(10): gm
  modified_base (11)..(11): cm
  modified_base (12)..(12): 2'-deoxy-2'-fluoroadenosine
  modified_base (13)..(13): um
  modified_base (14)..(14): 2'-deoxy-2'-fluorocytidine
  modified_base (15)..(15): 2'-O-methyladenosine
  modified_base (16)..(16): 2'-deoxy-2'-fluoroguanosine
  modified_base (17)..(17): um
  modified_base (18)..(18): 2'-deoxy-2'-fluorouridine
  modified_base (19)..(19): um
  modified_base (20)..(20): 2'-deoxy-2'-fluorouridine
  modified_base (21)..(21): cm
  modified_base (22)..(22): 2'-deoxy-2'-fluorocytidine
  misc_feature (22)..(23): 5'-phosphonothioate
  modified_base (23)..(23): 2'-O-methyladenosine
acaucggaugcaucaguuuucca

SEQ ID NO: 6731 - RNA, 23 nt, Artificial Sequence
  siRNA antisense strand against b2GPI
  modified_base (1)..(1): 2'-deoxy-2'-fluorouridine
  modified_base (2)..(2): 2'-O-methyladenosine
  misc_feature (2)..(3): 5'-phosphonothioate
  modified_base (3)..(3): 2'-deoxy-2'-fluorocytidine
  modified_base (4)..(4): 2'-O-methyladenosine
  modified_base (5)..(5): 2'-deoxy-2'-fluorouridine
  modified_base (6)..(6): cm
  modified_base (7)..(7): 2'-deoxy-2'-fluoroguanosine
  modified_base (8)..(8): gm
  modified_base (9)..(9): 2'-deoxy-2'-fluoroadenosine
  modified_base (10)..(10): um
  modified_base (11)..(11): gm
  modified_base (12)..(12): 2'-deoxy-2'-fluorocytidine
  modified_base (13)..(13): 2'-O-methyladenosine
  modified_base (14)..(14): 2'-deoxy-2'-fluorouridine
  modified_base (15)..(15): cm
  modified_base (16)..(16): 2'-deoxy-2'-fluoroadenosine
  modified_base (17)..(17): gm
  modified_base (18)..(18): 2'-deoxy-2'-fluorouridine
  modified_base (19)..(19): um
  modified_base (20)..(20): 2'-deoxy-2'-fluorouridine
  modified_base (21)..(21): um
  modified_base (22)..(22): 2'-deoxy-2'-fluorocytidine
  misc_feature (22)..(23): 5'-phosphonothioate
  modified_base (23)..(23): cm
uacaucggaugcaucaguuuucc

SEQ ID NO: 6732 - RNA, 23 nt, Artificial Sequence
  siRNA antisense strand against b2GPI
  modified_base (1)..(1): 2'-deoxy-2'-fluorouridine
  modified_base (2)..(2): um
  misc_feature (2)..(3): 5'-phosphonothioate
  modified_base (3)..(3): 2'-deoxy-2'-fluorouridine
  modified_base (4)..(4): 2'-O-methyladenosine
  modified_base (5)..(5): 2'-deoxy-2'-fluorocytidine
  modified_base (6)..(6): 2'-O-methyladenosine
  modified_base (7)..(7): 2'-deoxy-2'-fluorouridine
  modified_base (8)..(8): cm
  modified_base (9)..(9): 2'-deoxy-2'-fluoroguanosine
  modified_base (10)..(10): gm
  modified_base (11)..(11): 2'-O-methyladenosine
  modified_base (12)..(12): 2'-deoxy-2'-fluorouridine
  modified_base (13)..(13): gm
  modified_base (14)..(14): 2'-deoxy-2'-fluorocytidine
  modified_base (15)..(15): 2'-O-methyladenosine
  modified_base (16)..(16): 2'-deoxy-2'-fluorouridine
  modified_base (17)..(17): cm
  modified_base (18)..(18): 2'-deoxy-2'-fluoroadenosine
  modified_base (19)..(19): gm
  modified_base (20)..(20): 2'-deoxy-2'-fluorouridine
  modified_base (21)..(21): um
  modified_base (22)..(22): 2'-deoxy-2'-fluorouridine
  misc_feature (22)..(23): 5'-phosphonothioate
  modified_base (23)..(23): um
uuuacaucggaugcaucaguuuu

SEQ ID NO: 6733 - RNA, 23 nt, Artificial Sequence
  siRNA antisense strand against b2GPI
  modified_base (1)..(1): 2'-deoxy-2'-fluorocytidine
  modified_base (2)..(2): um
  misc_feature (2)..(3): 5'-phosphonothioate
  modified_base (3)..(3): 2'-deoxy-2'-fluorouridine
  modified_base (4)..(4): um
  modified_base (5)..(5): 2'-deoxy-2'-fluoroadenosine
  modified_base (6)..(6): cm
  modified_base (7)..(7): 2'-deoxy-2'-fluoroadenosine
  modified_base (8)..(8): um
  modified_base (9)..(9): 2'-deoxy-2'-fluorocytidine
  modified_base (10)..(10): gm
  modified_base (11)..(11): gm
  modified_base (12)..(12): 2'-deoxy-2'-fluoroadenosine
  modified_base (13)..(13): um
  modified_base (14)..(14): 2'-deoxy-2'-fluoroguanosine
  modified_base (15)..(15): cm
  modified_base (16)..(16): 2'-deoxy-2'-fluoroadenosine
  modified_base (17)..(17): um
  modified_base (18)..(18): 2'-deoxy-2'-fluorocytidine
  modified_base (19)..(19): 2'-O-methyladenosine
  modified_base (20)..(20): 2'-deoxy-2'-fluoroguanosine
  modified_base (21)..(21): um
  modified_base (22)..(22): 2'-deoxy-2'-fluorouridine
  misc_feature (22)..(23): 5'-phosphonothioate
  modified_base (23)..(23): um
cuuuacaucggaugcaucaguuu

SEQ ID NO: 6734 - RNA, 23 nt, Artificial Sequence
  siRNA antisense strand against b2GPI
  modified_base (1)..(1): 2'-deoxy-2'-fluoroadenosine
  modified_base (2)..(2): um
  misc_feature (2)..(3): 5'-phosphonothioate
  modified_base (3)..(3): 2'-deoxy-2'-fluoroguanosine
  modified_base (4)..(4): gm
  modified_base (5)..(5): 2'-deoxy-2'-fluorocytidine
  modified_base (6)..(6): um
  modified_base (7)..(7): 2'-deoxy-2'-fluorouridine
  modified_base (8)..(8): um
  modified_base (9)..(9): 2'-deoxy-2'-fluoroadenosine
  modified_base (10)..(10): cm
  modified_base (11)..(11): 2'-O-methyladenosine
  modified_base (12)..(12): 2'-deoxy-2'-fluorouridine
  modified_base (13)..(13): cm
  modified_base (14)..(14): 2'-deoxy-2'-fluoroguanosine
  modified_base (15)..(15): gm
  modified_base (16)..(16): 2'-deoxy-2'-fluoroadenosine
  modified_base (17)..(17): um
  modified_base (18)..(18): 2'-deoxy-2'-fluoroguanosine
  modified_base (19)..(19): cm
  modified_base (20)..(20): 2'-deoxy-2'-fluoroadenosine
  modified_base (21)..(21): um
  modified_base (22)..(22): 2'-deoxy-2'-fluorocytidine
  misc_feature (22)..(23): 5'-phosphonothioate
  modified_base (23)..(23): 2'-O-methyladenosine
auggcuuuacaucggaugcauca

SEQ ID NO: 6735 - RNA, 23 nt, Artificial Sequence
  siRNA antisense strand against b2GPI
  modified_base (1)..(1): 2'-deoxy-2'-fluorocytidine
  modified_base (2)..(2): 2'-O-methyladenosine
  misc_feature (2)..(3): 5'-phosphonothioate
  modified_base (3)..(3): 2'-deoxy-2'-fluorouridine
  modified_base (4)..(4): gm
  modified_base (5)..(5): 2'-deoxy-2'-fluoroguanosine
  modified_base (6)..(6): cm
  modified_base (7)..(7): 2'-deoxy-2'-fluorouridine
  modified_base (8)..(8): um
  modified_base (9)..(9): 2'-deoxy-2'-fluorouridine
  modified_base (10)..(10): 2'-O-methyladenosine
  modified_base (11)..(11): cm
  modified_base (12)..(12): 2'-deoxy-2'-fluoroadenosine
  modified_base (13)..(13): um
  modified_base (14)..(14): 2'-deoxy-2'-fluorocytidine
  modified_base (15)..(15): gm
  modified_base (16)..(16): 2'-deoxy-2'-fluoroguanosine
  modified_base (17)..(17): 2'-O-methyladenosine
  modified_base (18)..(18): 2'-deoxy-2'-fluorouridine
  modified_base (19)..(19): gm
  modified_base (20)..(20): 2'-deoxy-2'-fluorocytidine
  modified_base (21)..(21): 2'-O-methyladenosine
  modified_base (22)..(22): 2'-deoxy-2'-fluorouridine
  misc_feature (22)..(23): 5'-phosphonothioate
  modified_base (23)..(23): cm
cauggcuuuacaucggaugcauc

SEQ ID NO: 6736 - RNA, 23 nt, Artificial Sequence
  siRNA antisense strand against b2GPI
  modified_base (1)..(1): 2'-deoxy-2'-fluorouridine
  modified_base (2)..(2): 2'-O-methyladenosine
  misc_feature (2)..(3): 5'-phosphonothioate
  modified_base (3)..(3): 2'-deoxy-2'-fluoroguanosine
  modified_base (4)..(4): cm
  modified_base (5)..(5): 2'-deoxy-2'-fluoroadenosine
  modified_base (6)..(6): um
  modified_base (7)..(7): 2'-deoxy-2'-fluoroguanosine
  modified_base (8)..(8): gm
  modified_base (9)..(9): 2'-deoxy-2'-fluorocytidine
  modified_base (10)..(10): um
  modified_base (11)..(11): um
  modified_base (12)..(12): 2'-deoxy-2'-fluorouridine
  modified_base (13)..(13): 2'-O-methyladenosine
  modified_base (14)..(14): 2'-deoxy-2'-fluorocytidine
  modified_base (15)..(15): 2'-O-methyladenosine
  modified_base (16)..(16): 2'-deoxy-2'-fluorouridine
  modified_base (17)..(17): cm
  modified_base (18)..(18): 2'-deoxy-2'-fluoroguanosine
  modified_base (19)..(19): gm
  modified_base (20)..(20): 2'-deoxy-2'-fluoroadenosine
  modified_base (21)..(21): um
  modified_base (22)..(22): 2'-deoxy-2'-fluoroguanosine
  misc_feature (22)..(23): 5'-phosphonothioate
  modified_base (23)..(23): cm
uagcauggcuuuacaucggaugc

SEQ ID NO: 6737 - RNA, 23 nt, Artificial Sequence
  siRNA antisense strand against b2GPI
  modified_base (1)..(1): 2'-deoxy-2'-fluorouridine
  modified_base (2)..(2): um
  misc_feature (2)..(3): 5'-phosphonothioate
  modified_base (3)..(3): 2'-deoxy-2'-fluoroadenosine
  modified_base (4)..(4): gm
  modified_base (5)..(5): 2'-deoxy-2'-fluorocytidine
  modified_base (6)..(6): 2'-O-methyladenosine
  modified_base (7)..(7): 2'-deoxy-2'-fluorouridine
  modified_base (8)..(8): gm
  modified_base (9)..(9): 2'-deoxy-2'-fluoroguanosine
  modified_base (10)..(10): cm
  modified_base (11)..(11): um
  modified_base (12)..(12): 2'-deoxy-2'-fluorouridine
  modified_base (13)..(13): um
  modified_base (14)..(14): 2'-deoxy-2'-fluoroadenosine
  modified_base (15)..(15): cm
  modified_base (16)..(16): 2'-deoxy-2'-fluoroadenosine
  modified_base (17)..(17): um
  modified_base (18)..(18): 2'-deoxy-2'-fluorocytidine
  modified_base (19)..(19): gm
  modified_base (20)..(20): 2'-deoxy-2'-fluoroguanosine
  modified_base (21)..(21): 2'-O-methyladenosine
  modified_base (22)..(22): 2'-deoxy-2'-fluorouridine
  misc_feature (22)..(23): 5'-phosphonothioate
  modified_base (23)..(23): gm
uuagcauggcuuuacaucggaug

SEQ ID NO: 6738 - RNA, 23 nt, Artificial Sequence
  siRNA antisense strand against b2GPI
  modified_base (1)..(1): 2'-deoxy-2'-fluorocytidine
  modified_base (2)..(2): um
  misc_feature (2)..(3): 5'-phosphonothioate
  modified_base (3)..(3): 2'-deoxy-2'-fluorouridine
  modified_base (4)..(4): 2'-O-methyladenosine
  modified_base (5)..(5): 2'-deoxy-2'-fluoroguanosine
  modified_base (6)..(6): cm
  modified_base (7)..(7): 2'-deoxy-2'-fluoroadenosine
  modified_base (8)..(8): um
  modified_base (9)..(9): 2'-deoxy-2'-fluoroguanosine
  modified_base (10)..(10): gm
  modified_base (11)..(11): cm
  modified_base (12)..(12): 2'-deoxy-2'-fluorouridine
  modified_base (13)..(13): um
  modified_base (14)..(14): 2'-deoxy-2'-fluorouridine
  modified_base (15)..(15): 2'-O-methyladenosine
  modified_base (16)..(16): 2'-deoxy-2'-fluorocytidine
  modified_base (17)..(17): 2'-O-methyladenosine
  modified_base (18)..(18): 2'-deoxy-2'-fluorouridine
  modified_base (19)..(19): cm
  modified_base (20)..(20): 2'-deoxy-2'-fluoroguanosine
  modified_base (21)..(21): gm
  modified_base (22)..(22): 2'-deoxy-2'-fluoroadenosine
  misc_feature (22)..(23): 5'-phosphonothioate
  modified_base (23)..(23): um
cuuagcauggcuuuacaucggau

SEQ ID NO: 6739 - RNA, 23 nt, Artificial Sequence
  siRNA antisense strand against b2GPI
  modified_base (1)..(1): 2'-deoxy-2'-fluoroadenosine
  modified_base (2)..(2): cm
  misc_feature (2)..(3): 5'-phosphonothioate
  modified_base (3)..(3): 2'-deoxy-2'-fluorocytidine
  modified_base (4)..(4): 2'-O-methyladenosine
  modified_base (5)..(5): 2'-deoxy-2'-fluorocytidine
  modified_base (6)..(6): cm
  modified_base (7)..(7): 2'-deoxy-2'-fluorouridine
  modified_base (8)..(8): um
  modified_base (9)..(9): 2'-deoxy-2'-fluoroadenosine
  modified_base (10)..(10): gm
  modified_base (11)..(11): cm
  modified_base (12)..(12): 2'-deoxy-2'-fluoroadenosine
  modified_base (13)..(13): um
  modified_base (14)..(14): 2'-deoxy-2'-fluoroguanosine
  modified_base (15)..(15): gm
  modified_base (16)..(16): 2'-deoxy-2'-fluorocytidine
  modified_base (17)..(17): um
  modified_base (18)..(18): 2'-deoxy-2'-fluorouridine
  modified_base (19)..(19): um
  modified_base (20)..(20): 2'-deoxy-2'-fluoroadenosine
  modified_base (21)..(21): cm
  modified_base (22)..(22): 2'-deoxy-2'-fluoroadenosine
  misc_feature (22)..(23): 5'-phosphonothioate
  modified_base (23)..(23): um
accaccuuagcauggcuuuacau

SEQ ID NO: 6740 - RNA, 23 nt, Artificial Sequence
  siRNA antisense strand against b2GPI
  modified_base (1)..(1): 2'-deoxy-2'-fluoroadenosine
  modified_base (2)..(2): 2'-O-methyladenosine
  misc_feature (2)..(3): 5'-phosphonothioate
  modified_base (3)..(3): 2'-deoxy-2'-fluorocytidine
  modified_base (4)..(4): cm
  modified_base (5)..(5): 2'-deoxy-2'-fluoroadenosine
  modified_base (6)..(6): cm
  modified_base (7)..(7): 2'-deoxy-2'-fluorocytidine
  modified_base (8)..(8): um
  modified_base (9)..(9): 2'-deoxy-2'-fluorouridine
  modified_base (10)..(10): 2'-O-methyladenosine
  modified_base (11)..(11): gm
  modified_base (12)..(12): 2'-deoxy-2'-fluorocytidine
  modified_base (13)..(13): 2'-O-methyladenosine
  modified_base (14)..(14): 2'-deoxy-2'-fluorouridine
  modified_base (15)..(15): gm
  modified_base (16)..(16): 2'-deoxy-2'-fluoroguanosine
  modified_base (17)..(17): cm
  modified_base (18)..(18): 2'-deoxy-2'-fluorouridine
  modified_base (19)..(19): um
  modified_base (20)..(20): 2'-deoxy-2'-fluorouridine
  modified_base (21)..(21): 2'-O-methyladenosine
  modified_base (22)..(22): 2'-deoxy-2'-fluorocytidine
  misc_feature (22)..(23): 5'-phosphonothioate
  modified_base (23)..(23): 2'-O-methyladenosine
aaccaccuuagcauggcuuuaca

SEQ ID NO: 6741 - RNA, 23 nt, Artificial Sequence
  siRNA antisense strand against b2GPI
  modified_base (1)..(1): 2'-deoxy-2'-fluoroadenosine
  modified_base (2)..(2): 2'-O-methyladenosine
  misc_feature (2)..(3): 5'-phosphonothioate
  modified_base (3)..(3): 2'-deoxy-2'-fluoroadenosine
  modified_base (4)..(4): cm
  modified_base (5)..(5): 2'-deoxy-2'-fluorocytidine
  modified_base (6)..(6): 2'-O-methyladenosine
  modified_base (7)..(7): 2'-deoxy-2'-fluorocytidine
  modified_base (8)..(8): cm
  modified_base (9)..(9): 2'-deoxy-2'-fluorouridine
  modified_base (10)..(10): um
  modified_base (11)..(11): 2'-O-methyladenosine
  modified_base (12)..(12): 2'-deoxy-2'-fluoroguanosine
  modified_base (13)..(13): cm
  modified_base (14)..(14): 2'-deoxy-2'-fluoroadenosine
  modified_base (15)..(15): um
  modified_base (16)..(16): 2'-deoxy-2'-fluoroguanosine
  modified_base (17)..(17): gm
  modified_base (18)..(18): 2'-deoxy-2'-fluorocytidine
  modified_base (19)..(19): um
  modified_base (20)..(20): 2'-deoxy-2'-fluorouridine
  modified_base (21)..(21): um
  modified_base (22)..(22): 2'-deoxy-2'-fluoroadenosine
  misc_feature (22)..(23): 5'-phosphonothioate
  modified_base (23)..(23): cm
aaaccaccuuagcauggcuuuac

SEQ ID NO: 6742 - RNA, 23 nt, Artificial Sequence
  siRNA antisense strand against b2GPI
  modified_base (1)..(1): 2'-deoxy-2'-fluoroadenosine
  modified_base (2)..(2): 2'-O-methyladenosine
  misc_feature (2)..(3): 5'-phosphonothioate
  modified_base (3)..(3): 2'-deoxy-2'-fluoroadenosine
  modified_base (4)..(4): 2'-O-methyladenosine
  modified_base (5)..(5): 2'-deoxy-2'-fluorocytidine
  modified_base (6)..(6): cm
  modified_base (7)..(7): 2'-deoxy-2'-fluoroadenosine
  modified_base (8)..(8): cm
  modified_base (9)..(9): 2'-deoxy-2'-fluorocytidine
  modified_base (10)..(10): um
  modified_base (11)..(11): um
  modified_base (12)..(12): 2'-deoxy-2'-fluoroadenosine
  modified_base (13)..(13): gm
  modified_base (14)..(14): 2'-deoxy-2'-fluorocytidine
  modified_base (15)..(15): 2'-O-methyladenosine
  modified_base (16)..(16): 2'-deoxy-2'-fluorouridine
  modified_base (17)..(17): gm
  modified_base (18)..(18): 2'-deoxy-2'-fluoroguanosine
  modified_base (19)..(19): cm
  modified_base (20)..(20): 2'-deoxy-2'-fluorouridine
  modified_base (21)..(21): um
  modified_base (22)..(22): 2'-deoxy-2'-fluorouridine
  misc_feature (22)..(23): 5'-phosphonothioate
  modified_base (23)..(23): 2'-O-methyladenosine
aaaaccaccuuagcauggcuuua

SEQ ID NO: 6743 - RNA, 23 nt, Artificial Sequence
  siRNA antisense strand against b2GPI
  modified_base (1)..(1): 2'-deoxy-2'-fluoroguanosine
  modified_base (2)..(2): 2'-O-methyladenosine
  misc_feature (2)..(3): 5'-phosphonothioate
  modified_base (3)..(3): 2'-deoxy-2'-fluoroadenosine
  modified_base (4)..(4): 2'-O-methyladenosine
  modified_base (5)..(5): 2'-deoxy-2'-fluoroadenosine
  modified_base (6)..(6): cm
  modified_base (7)..(7): 2'-deoxy-2'-fluorocytidine
  modified_base (8)..(8): 2'-O-methyladenosine
  modified_base (9)..(9): 2'-deoxy-2'-fluorocytidine
  modified_base (10)..(10): cm
  modified_base (11)..(11): um
  modified_base (12)..(12): 2'-deoxy-2'-fluorouridine
  modified_base (13)..(13): 2'-O-methyladenosine
  modified_base (14)..(14): 2'-deoxy-2'-fluoroguanosine
  modified_base (15)..(15): cm
  modified_base (16)..(16): 2'-deoxy-2'-fluoroadenosine
  modified_base (17)..(17): um
  modified_base (18)..(18): 2'-deoxy-2'-fluoroguanosine
  modified_base (19)..(19): gm
  modified_base (20)..(20): 2'-deoxy-2'-fluorocytidine
  modified_base (21)..(21): um
  modified_base (22)..(22): 2'-deoxy-2'-fluorouridine
  misc_feature (22)..(23): 5'-phosphonothioate
  modified_base (23)..(23): um
gaaaaccaccuuagcauggcuuu

SEQ ID NO: 6744 - RNA, 23 nt, Artificial Sequence
  siRNA antisense strand against b2GPI
  modified_base (1)..(1): 2'-deoxy-2'-fluorouridine
  modified_base (2)..(2): gm
  misc_feature (2)..(3): 5'-phosphonothioate
  modified_base (3)..(3): 2'-deoxy-2'-fluoroadenosine
  modified_base (4)..(4): 2'-O-methyladenosine
  modified_base (5)..(5): 2'-deoxy-2'-fluoroadenosine
  modified_base (6)..(6): 2'-O-methyladenosine
  modified_base (7)..(7): 2'-deoxy-2'-fluorocytidine
  modified_base (8)..(8): cm
  modified_base (9)..(9): 2'-deoxy-2'-fluoroadenosine
  modified_base (10)..(10): cm
  modified_base (11)..(11): cm
  modified_base (12)..(12): 2'-deoxy-2'-fluorouridine
  modified_base (13)..(13): um
  modified_base (14)..(14): 2'-deoxy-2'-fluoroadenosine
  modified_base (15)..(15): gm
  modified_base (16)..(16): 2'-deoxy-2'-fluorocytidine
  modified_base (17)..(17): 2'-O-methyladenosine
  modified_base (18)..(18): 2'-deoxy-2'-fluorouridine
  modified_base (19)..(19): gm
  modified_base (20)..(20): 2'-deoxy-2'-fluoroguanosine
  modified_base (21)..(21): cm
  modified_base (22)..(22): 2'-deoxy-2'-fluorouridine
  misc_feature (22)..(23): 5'-phosphonothioate
  modified_base (23)..(23): um
ugaaaaccaccuuagcauggcuu

SEQ ID NO: 6745 - RNA, 23 nt, Artificial Sequence
  siRNA antisense strand against b2GPI
  modified_base (1)..(1): 2'-deoxy-2'-fluorocytidine
  modified_base (2)..(2): um
  misc_feature (2)..(3): 5'-phosphonothioate
  modified_base (3)..(3): 2'-deoxy-2'-fluoroguanosine
  modified_base (4)..(4): 2'-O-methyladenosine
  modified_base (5)..(5): 2'-deoxy-2'-fluoroadenosine
  modified_base (6)..(6): 2'-O-methyladenosine
  modified_base (7)..(7): 2'-deoxy-2'-fluoroadenosine
  modified_base (8)..(8): cm
  modified_base (9)..(9): 2'-deoxy-2'-fluorocytidine
  modified_base (10)..(10): 2'-O-methyladenosine
  modified_base (11)..(11): cm
  modified_base (12)..(12): 2'-deoxy-2'-fluorocytidine
  modified_base (13)..(13): um
  modified_base (14)..(14): 2'-deoxy-2'-fluorouridine
  modified_base (15)..(15): 2'-O-methyladenosine
  modified_base (16)..(16): 2'-deoxy-2'-fluoroguanosine
  modified_base (17)..(17): cm
  modified_base (18)..(18): 2'-deoxy-2'-fluoroadenosine
  modified_base (19)..(19): um
  modified_base (20)..(20): 2'-deoxy-2'-fluoroguanosine
  modified_base (21)..(21): gm
  modified_base (22)..(22): 2'-deoxy-2'-fluorocytidine
  misc_feature (22)..(23): 5'-phosphonothioate
  modified_base (23)..(23): um
cugaaaaccaccuuagcauggcu

SEQ ID NO: 6746 - RNA, 23 nt, Artificial Sequence
  siRNA antisense strand against b2GPI
  modified_base (1)..(1): 2'-deoxy-2'-fluorouridine
  modified_base (2)..(2): cm
  misc_feature (2)..(3): 5'-phosphonothioate
  modified_base (3)..(3): 2'-deoxy-2'-fluorouridine
  modified_base (4)..(4): gm
  modified_base (5)..(5): 2'-deoxy-2'-fluoroadenosine
  modified_base (6)..(6): 2'-O-methyladenosine
  modified_base (7)..(7): 2'-deoxy-2'-fluoroadenosine
  modified_base (8)..(8): 2'-O-methyladenosine
  modified_base (9)..(9): 2'-deoxy-2'-fluorocytidine
  modified_base (10)..(10): cm
  modified_base (11)..(11): 2'-O-methyladenosine
  modified_base (12)..(12): 2'-deoxy-2'-fluorocytidine
  modified_base (13)..(13): cm
  modified_base (14)..(14): 2'-deoxy-2'-fluorouridine
  modified_base (15)..(15): um
  modified_base (16)..(16): 2'-deoxy-2'-fluoroadenosine
  modified_base (17)..(17): gm
  modified_base (18)..(18): 2'-deoxy-2'-fluorocytidine
  modified_base (19)..(19): 2'-O-methyladenosine
  modified_base (20)..(20): 2'-deoxy-2'-fluorouridine
  modified_base (21)..(21): gm
  modified_base (22)..(22): 2'-deoxy-2'-fluoroguanosine
  misc_feature (22)..(23): 5'-phosphonothioate
  modified_base (23)..(23): cm
ucugaaaaccaccuuagcauggc

SEQ ID NO: 6747 - RNA, 23 nt, Artificial Sequence
  siRNA antisense strand against b2GPI
  modified_base (1)..(1): 2'-deoxy-2'-fluoroadenosine
  modified_base (2)..(2): 2'-O-methyladenosine
  misc_feature (2)..(3): 5'-phosphonothioate
  modified_base (3)..(3): 2'-deoxy-2'-fluorouridine
  modified_base (4)..(4): cm
  modified_base (5)..(5): 2'-deoxy-2'-fluorouridine
  modified_base (6)..(6): gm
  modified_base (7)..(7): 2'-deoxy-2'-fluoroadenosine
  modified_base (8)..(8): 2'-O-methyladenosine
  modified_base (9)..(9): 2'-deoxy-2'-fluoroadenosine
  modified_base (10)..(10): 2'-O-methyladenosine
  modified_base (11)..(11): cm
  modified_base (12)..(12): 2'-deoxy-2'-fluorocytidine
  modified_base (13)..(13): 2'-O-methyladenosine
  modified_base (14)..(14): 2'-deoxy-2'-fluorocytidine
  modified_base (15)..(15): cm
  modified_base (16)..(16): 2'-deoxy-2'-fluorouridine
  modified_base (17)..(17): um
  modified_base (18)..(18): 2'-deoxy-2'-fluoroadenosine
  modified_base (19)..(19): gm
  modified_base (20)..(20): 2'-deoxy-2'-fluorocytidine
  modified_base (21)..(21): 2'-O-methyladenosine
  modified_base (22)..(22): 2'-deoxy-2'-fluorouridine
  misc_feature (22)..(23): 5'-phosphonothioate
  modified_base (23)..(23): gm
aaucugaaaaccaccuuagcaug

SEQ ID NO: 6748 - RNA, 23 nt, Artificial Sequence
  siRNA antisense strand against b2GPI
  modified_base (1)..(1): 2'-deoxy-2'-fluoroguanosine
  modified_base (2)..(2): 2'-O-methyladenosine
  misc_feature (2)..(3): 5'-phosphonothioate
  modified_base (3)..(3): 2'-deoxy-2'-fluoroadenosine
  modified_base (4)..(4): um
  modified_base (5)..(5): 2'-deoxy-2'-fluorocytidine
  modified_base (6)..(6): um
  modified_base (7)..(7): 2'-deoxy-2'-fluoroguanosine
  modified_base (8)..(8): 2'-O-methyladenosine
  modified_base (9)..(9): 2'-deoxy-2'-fluoroadenosine
  modified_base (10)..(10): 2'-O-methyladenosine
  modified_base (11)..(11): 2'-O-methyladenosine
  modified_base (12)..(12): 2'-deoxy-2'-fluorocytidine
  modified_base (13)..(13): cm
  modified_base (14)..(14): 2'-deoxy-2'-fluoroadenosine
  modified_base (15)..(15): cm
  modified_base (16)..(16): 2'-deoxy-2'-fluorocytidine
  modified_base (17)..(17): um
  modified_base (18)..(18): 2'-deoxy-2'-fluorouridine
  modified_base (19)..(19): 2'-O-methyladenosine
  modified_base (20)..(20): 2'-deoxy-2'-fluoroguanosine
  modified_base (21)..(21): cm
  modified_base (22)..(22): 2'-deoxy-2'-fluoroadenosine
  misc_feature (22)..(23): 5'-phosphonothioate
  modified_base (23)..(23): um
gaaucugaaaaccaccuuagcau

SEQ ID NO: 6749 - RNA, 23 nt, Artificial Sequence
  siRNA antisense strand against b2GPI
  modified_base (1)..(1): 2'-deoxy-2'-fluorouridine
  modified_base (2)..(2): gm
  misc_feature (2)..(3): 5'-phosphonothioate
  modified_base (3)..(3): 2'-deoxy-2'-fluoroguanosine
  modified_base (4)..(4): 2'-O-methyladenosine
  modified_base (5)..(5): 2'-deoxy-2'-fluoroadenosine
  modified_base (6)..(6): um
  modified_base (7)..(7): 2'-deoxy-2'-fluorocytidine
  modified_base (8)..(8): um
  modified_base (9)..(9): 2'-deoxy-2'-fluoroguanosine
  modified_base (10)..(10): 2'-O-methyladenosine
  modified_base (11)..(11): 2'-O-methyladenosine
  modified_base (12)..(12): 2'-deoxy-2'-fluoroadenosine
  modified_base (13)..(13): 2'-O-methyladenosine
  modified_base (14)..(14): 2'-deoxy-2'-fluorocytidine
  modified_base (15)..(15): cm
  modified_base (16)..(16): 2'-deoxy-2'-fluoroadenosine
  modified_base (17)..(17): cm
  modified_base (18)..(18): 2'-deoxy-2'-fluorocytidine
  modified_base (19)..(19): um
  modified_base (20)..(20): 2'-deoxy-2'-fluorouridine
  modified_base (21)..(21): 2'-O-methyladenosine
  modified_base (22)..(22): 2'-deoxy-2'-fluoroguanosine
  misc_feature (22)..(23): 5'-phosphonothioate
  modified_base (23)..(23): cm
uggaaucugaaaaccaccuuagc

SEQ ID NO: 6750 - RNA, 23 nt, Artificial Sequence
  siRNA antisense strand against b2GPI
  modified_base (1)..(1): 2'-deoxy-2'-fluoroguanosine
  modified_base (2)..(2): um
  misc_feature (2)..(3): 5'-phosphonothioate
  modified_base (3)..(3): 2'-deoxy-2'-fluoroguanosine
  modified_base (4)..(4): gm
  modified_base (5)..(5): 2'-deoxy-2'-fluoroadenosine
  modified_base (6)..(6): 2'-O-methyladenosine
  modified_base (7)..(7): 2'-deoxy-2'-fluorouridine
  modified_base (8)..(8): cm
  modified_base (9)..(9): 2'-deoxy-2'-fluorouridine
  modified_base (10)..(10): gm
  modified_base (11)..(11): 2'-O-methyladenosine
  modified_base (12)..(12): 2'-deoxy-2'-fluoroadenosine
  modified_base (13)..(13): 2'-O-methyladenosine
  modified_base (14)..(14): 2'-deoxy-2'-fluoroadenosine
  modified_base (15)..(15): cm
  modified_base (16)..(16): 2'-deoxy-2'-fluorocytidine
  modified_base (17)..(17): 2'-O-methyladenosine
  modified_base (18)..(18): 2'-deoxy-2'-fluorocytidine
  modified_base (19)..(19): cm
  modified_base (20)..(20): 2'-deoxy-2'-fluorouridine
  modified_base (21)..(21): um
  modified_base (22)..(22): 2'-deoxy-2'-fluoroadenosine
  misc_feature (22)..(23): 5'-phosphonothioate
  modified_base (23)..(23): gm
guggaaucugaaaaccaccuuag

SEQ ID NO: 6751 - RNA, 23 nt, Artificial Sequence
  siRNA antisense strand against b2GPI
  modified_base (1)..(1): 2'-deoxy-2'-fluorouridine
  modified_base (2)..(2): gm
  misc_feature (2)..(3): 5'-phosphonothioate
  modified_base (3)..(3): 2'-deoxy-2'-fluorouridine
  modified_base (4)..(4): gm
  modified_base (5)..(5): 2'-deoxy-2'-fluoroguanosine
  modified_base (6)..(6): 2'-O-methyladenosine
  modified_base (7)..(7): 2'-deoxy-2'-fluoroadenosine
  modified_base (8)..(8): um
  modified_base (9)..(9): 2'-deoxy-2'-fluorocytidine
  modified_base (10)..(10): um
  modified_base (11)..(11): gm
  modified_base (12)..(12): 2'-deoxy-2'-fluoroadenosine
  modified_base (13)..(13): 2'-O-methyladenosine
  modified_base (14)..(14): 2'-deoxy-2'-fluoroadenosine
  modified_base (15)..(15): 2'-O-methyladenosine
  modified_base (16)..(16): 2'-deoxy-2'-fluorocytidine
  modified_base (17)..(17): cm
  modified_base (18)..(18): 2'-deoxy-2'-fluoroadenosine
  modified_base (19)..(19): cm
  modified_base (20)..(20): 2'-deoxy-2'-fluorocytidine
  modified_base (21)..(21): um
  modified_base (22)..(22): 2'-deoxy-2'-fluorouridine
  misc_feature (22)..(23): 5'-phosphonothioate
  modified_base (23)..(23): 2'-O-methyladenosine
uguggaaucugaaaaccaccuua

SEQ ID NO: 6752 - RNA, 23 nt, Artificial Sequence
  siRNA antisense strand against b2GPI
  modified_base (1)..(1): 2'-deoxy-2'-fluorouridine
  modified_base (2)..(2): gm
  misc_feature (2)..(3): 5'-phosphonothioate
  modified_base (3)..(3): 2'-deoxy-2'-fluorouridine
  modified_base (4)..(4): gm
  modified_base (5)..(5): 2'-deoxy-2'-fluorouridine
  modified_base (6)..(6): gm
  modified_base (7)..(7): 2'-deoxy-2'-fluoroguanosine
  modified_base (8)..(8): 2'-O-methyladenosine
  modified_base (9)..(9): 2'-deoxy-2'-fluoroadenosine
  modified_base (10)..(10): um
  modified_base (11)..(11): cm
  modified_base (12)..(12): 2'-deoxy-2'-fluorouridine
  modified_base (13)..(13): gm
  modified_base (14)..(14): 2'-deoxy-2'-fluoroadenosine
  modified_base (15)..(15): 2'-O-methyladenosine
  modified_base (16)..(16): 2'-deoxy-2'-fluoroadenosine
  modified_base (17)..(17): 2'-O-methyladenosine
  modified_base (18)..(18): 2'-deoxy-2'-fluorocytidine
  modified_base (19)..(19): cm
  modified_base (20)..(20): 2'-deoxy-2'-fluoroadenosine
  modified_base (21)..(21): cm
  modified_base (22)..(22): 2'-deoxy-2'-fluorocytidine
  misc_feature (22)..(23): 5'-phosphonothioate
  modified_base (23)..(23): um
uguguggaaucugaaaaccaccu

SEQ ID NO: 6753 - RNA, 23 nt, Artificial Sequence
  siRNA antisense strand against b2GPI
  modified_base (1)..(1): 2'-deoxy-2'-fluorouridine
  modified_base (2)..(2): um
  misc_feature (2)..(3): 5'-phosphonothioate
  modified_base (3)..(3): 2'-deoxy-2'-fluoroguanosine
  modified_base (4)..(4): um
  modified_base (5)..(5): 2'-deoxy-2'-fluoroguanosine
  modified_base (6)..(6): um
  modified_base (7)..(7): 2'-deoxy-2'-fluoroguanosine
  modified_base (8)..(8): gm
  modified_base (9)..(9): 2'-deoxy-2'-fluoroadenosine
  modified_base (10)..(10): 2'-O-methyladenosine
  modified_base (11)..(11): um
  modified_base (12)..(12): 2'-deoxy-2'-fluorocytidine
  modified_base (13)..(13): um
  modified_base (14)..(14): 2'-deoxy-2'-fluoroguanosine
  modified_base (15)..(15): 2'-O-methyladenosine
  modified_base (16)..(16): 2'-deoxy-2'-fluoroadenosine
  modified_base (17)..(17): 2'-O-methyladenosine
  modified_base (18)..(18): 2'-deoxy-2'-fluoroadenosine
  modified_base (19)..(19): cm
  modified_base (20)..(20): 2'-deoxy-2'-fluorocytidine
  modified_base (21)..(21): 2'-O-methyladenosine
  modified_base (22)..(22): 2'-deoxy-2'-fluorocytidine
  misc_feature (22)..(23): 5'-phosphonothioate
  modified_base (23)..(23): cm
uuguguggaaucugaaaaccacc

SEQ ID NO: 6754 - RNA, 23 nt, Artificial Sequence
  siRNA antisense strand against b2GPI
  modified_base (1)..(1): 2'-deoxy-2'-fluorouridine
  modified_base (2)..(2): um
  misc_feature (2)..(3): 5'-phosphonothioate
  modified_base (3)..(3): 2'-deoxy-2'-fluorouridine
  modified_base (4)..(4): gm
  modified_base (5)..(5): 2'-deoxy-2'-fluorouridine
  modified_base (6)..(6): gm
  modified_base (7)..(7): 2'-deoxy-2'-fluorouridine
  modified_base (8)..(8): gm
  modified_base (9)..(9): 2'-deoxy-2'-fluoroguanosine
  modified_base (10)..(10): 2'-O-methyladenosine
  modified_base (11)..(11): 2'-O-methyladenosine
  modified_base (12)..(12): 2'-deoxy-2'-fluorouridine
  modified_base (13)..(13): cm
  modified_base (14)..(14): 2'-deoxy-2'-fluorouridine
  modified_base (15)..(15): gm
  modified_base (16)..(16): 2'-deoxy-2'-fluoroadenosine
  modified_base (17)..(17): 2'-O-methyladenosine
  modified_base (18)..(18): 2'-deoxy-2'-fluoroadenosine
  modified_base (19)..(19): 2'-O-methyladenosine
  modified_base (20)..(20): 2'-deoxy-2'-fluorocytidine
  modified_base (21)..(21): cm
  modified_base (22)..(22): 2'-deoxy-2'-fluoroadenosine
  misc_feature (22)..(23): 5'-phosphonothioate
  modified_base (23)..(23): cm
uuuguguggaaucugaaaaccac

SEQ ID NO: 6755 - RNA, 23 nt, Artificial Sequence
  siRNA antisense strand against b2GPI
  modified_base (1)..(1): 2'-deoxy-2'-fluorouridine
  modified_base (2)..(2): um
  misc_feature (2)..(3): 5'-phosphonothioate
  modified_base (3)..(3): 2'-deoxy-2'-fluorouridine
  modified_base (4)..(4): um
  modified_base (5)..(5): 2'-deoxy-2'-fluoroguanosine
  modified_base (6)..(6): um
  modified_base (7)..(7): 2'-deoxy-2'-fluoroguanosine
  modified_base (8)..(8): um
  modified_base (9)..(9): 2'-deoxy-2'-fluoroguanosine
  modified_base (10)..(10): gm
  modified_base (11)..(11): 2'-O-methyladenosine
  modified_base (12)..(12): 2'-deoxy-2'-fluoroadenosine
  modified_base (13)..(13): um
  modified_base (14)..(14): 2'-deoxy-2'-fluorocytidine
  modified_base (15)..(15): um
  modified_base (16)..(16): 2'-deoxy-2'-fluoroguanosine
  modified_base (17)..(17): 2'-O-methyladenosine
  modified_base (18)..(18): 2'-deoxy-2'-fluoroadenosine
  modified_base (19)..(19): 2'-O-methyladenosine
  modified_base (20)..(20): 2'-deoxy-2'-fluoroadenosine
  modified_base (21)..(21): cm
  modified_base (22)..(22): 2'-deoxy-2'-fluorocytidine
  misc_feature (22)..(23): 5'-phosphonothioate
  modified_base (23)..(23): 2'-O-methyladenosine
uuuuguguggaaucugaaaacca

SEQ ID NO: 6756 - RNA, 23 nt, Artificial Sequence
  siRNA antisense strand against b2GPI
  modified_base (1)..(1): 2'-deoxy-2'-fluoroadenosine
  modified_base (2)..(2): um
  misc_feature (2)..(3): 5'-phosphonothioate
  modified_base (3)..(3): 2'-deoxy-2'-fluorouridine
  modified_base (4)..(4): um
  modified_base (5)..(5): 2'-deoxy-2'-fluorouridine
  modified_base (6)..(6): gm
  modified_base (7)..(7): 2'-deoxy-2'-fluorouridine
  modified_base (8)..(8): gm
  modified_base (9)..(9): 2'-deoxy-2'-fluorouridine
  modified_base (10)..(10): gm
  modified_base (11)..(11): gm
  modified_base (12)..(12): 2'-deoxy-2'-fluoroadenosine
  modified_base (13)..(13): 2'-O-methyladenosine
  modified_base (14)..(14): 2'-deoxy-2'-fluorouridine
  modified_base (15)..(15): cm
  modified_base (16)..(16): 2'-deoxy-2'-fluorouridine
  modified_base (17)..(17): gm
  modified_base (18)..(18): 2'-deoxy-2'-fluoroadenosine
  modified_base (19)..(19): 2'-O-methyladenosine
  modified_base (20)..(20): 2'-deoxy-2'-fluoroadenosine
  modified_base (21)..(21): 2'-O-methyladenosine
  modified_base (22)..(22): 2'-deoxy-2'-fluorocytidine
  misc_feature (22)..(23): 5'-phosphonothioate
  modified_base (23)..(23): cm
auuuuguguggaaucugaaaacc

SEQ ID NO: 6757 - RNA, 23 nt, Artificial Sequence
  siRNA antisense strand against b2GPI
  modified_base (1)..(1): 2'-deoxy-2'-fluorocytidine
  modified_base (2)..(2): 2'-O-methyladenosine
  misc_feature (2)..(3): 5'-phosphonothioate
  modified_base (3)..(3): 2'-deoxy-2'-fluorouridine
  modified_base (4)..(4): um
  modified_base (5)..(5): 2'-deoxy-2'-fluorouridine
  modified_base (6)..(6): um
  modified_base (7)..(7): 2'-deoxy-2'-fluoroguanosine
  modified_base (8)..(8): um
  modified_base (9)..(9): 2'-deoxy-2'-fluoroguanosine
  modified_base (10)..(10): um
  modified_base (11)..(11): gm
  modified_base (12)..(12): 2'-deoxy-2'-fluoroguanosine
  modified_base (13)..(13): 2'-O-methyladenosine
  modified_base (14)..(14): 2'-deoxy-2'-fluoroadenosine
  modified_base (15)..(15): um
  modified_base (16)..(16): 2'-deoxy-2'-fluorocytidine
  modified_base (17)..(17): um
  modified_base (18)..(18): 2'-deoxy-2'-fluoroguanosine
  modified_base (19)..(19): 2'-O-methyladenosine
  modified_base (20)..(20): 2'-deoxy-2'-fluoroadenosine
  modified_base (21)..(21): 2'-O-methyladenosine
  modified_base (22)..(22): 2'-deoxy-2'-fluoroadenosine
  misc_feature (22)..(23): 5'-phosphonothioate
  modified_base (23)..(23): cm
cauuuuguguggaaucugaaaac

SEQ ID NO: 6758 - RNA, 23 nt, Artificial Sequence
  siRNA antisense strand against b2GPI
  modified_base (1)..(1): 2'-deoxy-2'-fluoroadenosine
  modified_base (2)..(2): cm
  misc_feature (2)..(3): 5'-phosphonothioate
  modified_base (3)..(3): 2'-deoxy-2'-fluoroadenosine
  modified_base (4)..(4): um
  modified_base (5)..(5): 2'-deoxy-2'-fluorouridine
  modified_base (6)..(6): um
  modified_base (7)..(7): 2'-deoxy-2'-fluorouridine
  modified_base (8)..(8): gm
  modified_base (9)..(9): 2'-deoxy-2'-fluorouridine
  modified_base (10)..(10): gm
  modified_base (11)..(11): um
  modified_base (12)..(12): 2'-deoxy-2'-fluoroguanosine
  modified_base (13)..(13): gm
  modified_base (14)..(14): 2'-deoxy-2'-fluoroadenosine
  modified_base (15)..(15): 2'-O-methyladenosine
  modified_base (16)..(16): 2'-deoxy-2'-fluorouridine
  modified_base (17)..(17): cm
  modified_base (18)..(18): 2'-deoxy-2'-fluorouridine
  modified_base (19)..(19): gm
  modified_base (20)..(20): 2'-deoxy-2'-fluoroadenosine
  modified_base (21)..(21): 2'-O-methyladenosine
  modified_base (22)..(22): 2'-deoxy-2'-fluoroadenosine
  misc_feature (22)..(23): 5'-phosphonothioate
  modified_base (23)..(23): 2'-O-methyladenosine
acauuuuguguggaaucugaaaa

SEQ ID NO: 6759 - RNA, 23 nt, Artificial Sequence
  siRNA antisense strand against b2GPI
  modified_base (1)..(1): 2'-deoxy-2'-fluoroguanosine
  modified_base (2)..(2): 2'-O-methyladenosine
  misc_feature (2)..(3): 5'-phosphonothioate
  modified_base (3)..(3): 2'-deoxy-2'-fluorocytidine
  modified_base (4)..(4): 2'-O-methyladenosine
  modified_base (5)..(5): 2'-deoxy-2'-fluorouridine
  modified_base (6)..(6): um
  modified_base (7)..(7): 2'-deoxy-2'-fluorouridine
  modified_base (8)..(8): um
  modified_base (9)..(9): 2'-deoxy-2'-fluoroguanosine
  modified_base (10)..(10): um
  modified_base (11)..(11): gm
  modified_base (12)..(12): 2'-deoxy-2'-fluorouridine
  modified_base (13)..(13): gm
  modified_base (14)..(14): 2'-deoxy-2'-fluoroguanosine
  modified_base (15)..(15): 2'-O-methyladenosine
  modified_base (16)..(16): 2'-deoxy-2'-fluoroadenosine
  modified_base (17)..(17): um
  modified_base (18)..(18): 2'-deoxy-2'-fluorocytidine
  modified_base (19)..(19): um
  modified_base (20)..(20): 2'-deoxy-2'-fluoroguanosine
  modified_base (21)..(21): 2'-O-methyladenosine
  modified_base (22)..(22): 2'-deoxy-2'-fluoroadenosine
  misc_feature (22)..(23): 5'-phosphonothioate
  modified_base (23)..(23): 2'-O-methyladenosine
gacauuuuguguggaaucugaaa

SEQ ID NO: 6760 - RNA, 23 nt, Artificial Sequence
  siRNA antisense strand against b2GPI
  modified_base (1)..(1): 2'-deoxy-2'-fluorouridine
  modified_base (2)..(2): gm
  misc_feature (2)..(3): 5'-phosphonothioate
  modified_base (3)..(3): 2'-deoxy-2'-fluoroadenosine
  modified_base (4)..(4): cm
  modified_base (5)..(5): 2'-deoxy-2'-fluoroadenosine
  modified_base (6)..(6): um
  modified_base (7)..(7): 2'-deoxy-2'-fluorouridine
  modified_base (8)..(8): um
  modified_base (9)..(9): 2'-deoxy-2'-fluorouridine
  modified_base (10)..(10): gm
  modified_base (11)..(11): um
  modified_base (12)..(12): 2'-deoxy-2'-fluoroguanosine
  modified_base (13)..(13): um
  modified_base (14)..(14): 2'-deoxy-2'-fluoroguanosine
  modified_base (15)..(15): gm
  modified_base (16)..(16): 2'-deoxy-2'-fluoroadenosine
  modified_base (17)..(17): 2'-O-methyladenosine
  modified_base (18)..(18): 2'-deoxy-2'-fluorouridine
  modified_base (19)..(19): cm
  modified_base (20)..(20): 2'-deoxy-2'-fluorouridine
  modified_base (21)..(21): gm
  modified_base (22)..(22): 2'-deoxy-2'-fluoroadenosine
  misc_feature (22)..(23): 5'-phosphonothioate
  modified_base (23)..(23): 2'-O-methyladenosine
ugacauuuuguguggaaucugaa

SEQ ID NO: 6761 - RNA, 23 nt, Artificial Sequence
  siRNA antisense strand against b2GPI
  modified_base (1)..(1): 2'-deoxy-2'-fluorouridine
  modified_base (2)..(2): gm
  misc_feature (2)..(3): 5'-phosphonothioate
  modified_base (3)..(3): 2'-deoxy-2'-fluorouridine
  modified_base (4)..(4): gm
  modified_base (5)..(5): 2'-deoxy-2'-fluoroadenosine
  modified_base (6)..(6): cm
  modified_base (7)..(7): 2'-deoxy-2'-fluoroadenosine
  modified_base (8)..(8): um
  modified_base (9)..(9): 2'-deoxy-2'-fluorouridine
  modified_base (10)..(10): um
  modified_base (11)..(11): um
  modified_base (12)..(12): 2'-deoxy-2'-fluoroguanosine
  modified_base (13)..(13): um
  modified_base (14)..(14): 2'-deoxy-2'-fluoroguanosine
  modified_base (15)..(15): um
  modified_base (16)..(16): 2'-deoxy-2'-fluoroguanosine
  modified_base (17)..(17): gm
  modified_base (18)..(18): 2'-deoxy-2'-fluoroadenosine
  modified_base (19)..(19): 2'-O-methyladenosine
  modified_base (20)..(20): 2'-deoxy-2'-fluorouridine
  modified_base (21)..(21): cm
  modified_base (22)..(22): 2'-deoxy-2'-fluorouridine
  misc_feature (22)..(23): 5'-phosphonothioate
  modified_base (23)..(23): gm
ugugacauuuuguguggaaucug

SEQ ID NO: 6762 - RNA, 23 nt, Artificial Sequence
  siRNA antisense strand against b2GPI
  modified_base (1)..(1): 2'-deoxy-2'-fluoroadenosine
  modified_base (2)..(2): gm
  misc_feature (2)..(3): 5'-phosphonothioate
  modified_base (3)..(3): 2'-deoxy-2'-fluorouridine
  modified_base (4)..(4): gm
  modified_base (5)..(5): 2'-deoxy-2'-fluorouridine
  modified_base (6)..(6): gm
  modified_base (7)..(7): 2'-deoxy-2'-fluoroadenosine
  modified_base (8)..(8): cm
  modified_base (9)..(9): 2'-deoxy-2'-fluoroadenosine
  modified_base (10)..(10): um
  modified_base (11)..(11): um
  modified_base (12)..(12): 2'-deoxy-2'-fluorouridine
  modified_base (13)..(13): um
  modified_base (14)..(14): 2'-deoxy-2'-fluoroguanosine
  modified_base (15)..(15): um
  modified_base (16)..(16): 2'-deoxy-2'-fluoroguanosine
  modified_base (17)..(17): um
  modified_base (18)..(18): 2'-deoxy-2'-fluoroguanosine
  modified_base (19)..(19): gm
  modified_base (20)..(20): 2'-deoxy-2'-fluoroadenosine
  modified_base (21)..(21): 2'-O-methyladenosine
  modified_base (22)..(22): 2'-deoxy-2'-fluorouridine
  misc_feature (22)..(23): 5'-phosphonothioate
  modified_base (23)..(23): cm
agugugacauuuuguguggaauc

SEQ ID NO: 6763 - RNA, 23 nt, Artificial Sequence
  siRNA antisense strand against b2GPI
  modified_base (1)..(1): 2'-deoxy-2'-fluoroadenosine
  modified_base (2)..(2): 2'-O-methyladenosine
  misc_feature (2)..(3): 5'-phosphonothioate
  modified_base (3)..(3): 2'-deoxy-2'-fluoroguanosine
  modified_base (4)..(4): um
  modified_base (5)..(5): 2'-deoxy-2'-fluoroguanosine
  modified_base (6)..(6): um
  modified_base (7)..(7): 2'-deoxy-2'-fluoroguanosine
  modified_base (8)..(8): 2'-O-methyladenosine
  modified_base (9)..(9): 2'-deoxy-2'-fluorocytidine
  modified_base (10)..(10): 2'-O-methyladenosine
  modified_base (11)..(11): um
  modified_base (12)..(12): 2'-deoxy-2'-fluorouridine
  modified_base (13)..(13): um
  modified_base (14)..(14): 2'-deoxy-2'-fluorouridine
  modified_base (15)..(15): gm
  modified_base (16)..(16): 2'-deoxy-2'-fluorouridine
  modified_base (17)..(17): gm
  modified_base (18)..(18): 2'-deoxy-2'-fluorouridine
  modified_base (19)..(19): gm
  modified_base (20)..(20): 2'-deoxy-2'-fluoroguanosine
  modified_base (21)..(21): 2'-O-methyladenosine
  modified_base (22)..(22): 2'-deoxy-2'-fluoroadenosine
  misc_feature (22)..(23): 5'-phosphonothioate
  modified_base (23)..(23): um
aagugugacauuuuguguggaau

SEQ ID NO: 6764 - RNA, 23 nt, Artificial Sequence
  siRNA antisense strand against b2GPI
  modified_base (1)..(1): 2'-deoxy-2'-fluorocytidine
  modified_base (2)..(2): 2'-O-methyladenosine
  misc_feature (2)..(3): 5'-phosphonothioate
  modified_base (3)..(3): 2'-deoxy-2'-fluoroadenosine
  modified_base (4)..(4): gm
  modified_base (5)..(5): 2'-deoxy-2'-fluorouridine
  modified_base (6)..(6): gm
  modified_base (7)..(7): 2'-deoxy-2'-fluorouridine
  modified_base (8)..(8): gm
  modified_base (9)..(9): 2'-deoxy-2'-fluoroadenosine
  modified_base (10)..(10): cm
  modified_base (11)..(11): 2'-O-methyladenosine
  modified_base (12)..(12): 2'-deoxy-2'-fluorouridine
  modified_base (13)..(13): um
  modified_base (14)..(14): 2'-deoxy-2'-fluorouridine
  modified_base (15)..(15): um
  modified_base (16)..(16): 2'-deoxy-2'-fluoroguanosine
  modified_base (17)..(17): um
  modified_base (18)..(18): 2'-deoxy-2'-fluoroguanosine
  modified_base (19)..(19): um
  modified_base (20)..(20): 2'-deoxy-2'-fluoroguanosine
  modified_base (21)..(21): gm
  modified_base (22)..(22): 2'-deoxy-2'-fluoroadenosine
  misc_feature (22)..(23): 5'-phosphonothioate
  modified_base (23)..(23): 2'-O-methyladenosine
caagugugacauuuuguguggaa

SEQ ID NO: 6765 - RNA, 23 nt, Artificial Sequence
  siRNA antisense strand against b2GPI
  modified_base (1)..(1): 2'-deoxy-2'-fluoroadenosine
  modified_base (2)..(2): cm
  misc_feature (2)..(3): 5'-phosphonothioate
  modified_base (3)..(3): 2'-deoxy-2'-fluoroadenosine
  modified_base (4)..(4): 2'-O-methyladenosine
  modified_base (5)..(5): 2'-deoxy-2'-fluoroguanosine
  modified_base (6)..(6): um
  modified_base (7)..(7): 2'-deoxy-2'-fluoroguanosine
  modified_base (8)..(8): um
  modified_base (9)..(9): 2'-deoxy-2'-fluoroguanosine
  modified_base (10)..(10): 2'-O-methyladenosine
  modified_base (11)..(11): cm
  modified_base (12)..(12): 2'-deoxy-2'-fluoroadenosine
  modified_base (13)..(13): um
  modified_base (14)..(14): 2'-deoxy-2'-fluorouridine
  modified_base (15)..(15): um
  modified_base (16)..(16): 2'-deoxy-2'-fluorouridine
  modified_base (17)..(17): gm
  modified_base (18)..(18): 2'-deoxy-2'-fluorouridine
  modified_base (19)..(19): gm
  modified_base (20)..(20): 2'-deoxy-2'-fluorouridine
  modified_base (21)..(21): gm
  modified_base (22)..(22): 2'-deoxy-2'-fluoroguanosine
  misc_feature (22)..(23): 5'-phosphonothioate
  modified_base (23)..(23): 2'-O-methyladenosine
acaagugugacauuuugugugga

SEQ ID NO: 6766 - RNA, 23 nt, Artificial Sequence
  siRNA antisense strand against b2GPI
  modified_base (1)..(1): 2'-deoxy-2'-fluoroadenosine
  modified_base (2)..(2): 2'-O-methyladenosine
  misc_feature (2)..(3): 5'-phosphonothioate
  modified_base (3)..(3): 2'-deoxy-2'-fluorocytidine
  modified_base (4)..(4): 2'-O-methyladenosine
  modified_base (5)..(5): 2'-deoxy-2'-fluoroadenosine
  modified_base (6)..(6): gm
  modified_base (7)..(7): 2'-deoxy-2'-fluorouridine
  modified_base (8)..(8): gm
  modified_base (9)..(9): 2'-deoxy-2'-fluorouridine
  modified_base (10)..(10): gm
  modified_base (11)..(11): 2'-O-methyladenosine
  modified_base (12)..(12): 2'-deoxy-2'-fluorocytidine
  modified_base (13)..(13): 2'-O-methyladenosine
  modified_base (14)..(14): 2'-deoxy-2'-fluorouridine
  modified_base (15)..(15): um
  modified_base (16)..(16): 2'-deoxy-2'-fluorouridine
  modified_base (17)..(17): um
  modified_base (18)..(18): 2'-deoxy-2'-fluoroguanosine
  modified_base (19)..(19): um
  modified_base (20)..(20): 2'-deoxy-2'-fluoroguanosine
  modified_base (21)..(21): um
  modified_base (22)..(22): 2'-deoxy-2'-fluoroguanosine
  misc_feature (22)..(23): 5'-phosphonothioate
  modified_base (23)..(23): gm
aacaagugugacauuuugugugg

SEQ ID NO: 6767 - RNA, 23 nt, Artificial Sequence
  siRNA antisense strand against b2GPI
  modified_base (1)..(1): 2'-deoxy-2'-fluoroadenosine
  modified_base (2)..(2): 2'-O-methyladenosine
  misc_feature (2)..(3): 5'-phosphonothioate
  modified_base (3)..(3): 2'-deoxy-2'-fluoroadenosine
  modified_base (4)..(4): cm
  modified_base (5)..(5): 2'-deoxy-2'-fluoroadenosine
  modified_base (6)..(6): 2'-O-methyladenosine
  modified_base (7)..(7): 2'-deoxy-2'-fluoroguanosine
  modified_base (8)..(8): um
  modified_base (9)..(9): 2'-deoxy-2'-fluoroguanosine
  modified_base (10)..(10): um
  modified_base (11)..(11): gm
  modified_base (12)..(12): 2'-deoxy-2'-fluoroadenosine
  modified_base (13)..(13): cm
  modified_base (14)..(14): 2'-deoxy-2'-fluoroadenosine
  modified_base (15)..(15): um
  modified_base (16)..(16): 2'-deoxy-2'-fluorouridine
  modified_base (17)..(17): um
  modified_base (18)..(18): 2'-deoxy-2'-fluorouridine
  modified_base (19)..(19): gm
  modified_base (20)..(20): 2'-deoxy-2'-fluorouridine
  modified_base (21)..(21): gm
  modified_base (22)..(22): 2'-deoxy-2'-fluorouridine
  misc_feature (22)..(23): 5'-phosphonothioate
  modified_base (23)..(23): gm
aaacaagugugacauuuugugug

SEQ ID NO: 6768 - RNA, 23 nt, Artificial Sequence
  siRNA antisense strand against b2GPI
  modified_base (1)..(1): 2'-deoxy-2'-fluoroadenosine
  modified_base (2)..(2): gm
  misc_feature (2)..(3): 5'-phosphonothioate
  modified_base (3)..(3): 2'-deoxy-2'-fluoroadenosine
  modified_base (4)..(4): 2'-O-methyladenosine
  modified_base (5)..(5): 2'-deoxy-2'-fluoroadenosine
  modified_base (6)..(6): cm
  modified_base (7)..(7): 2'-deoxy-2'-fluoroadenosine
  modified_base (8)..(8): 2'-O-methyladenosine
  modified_base (9)..(9): 2'-deoxy-2'-fluoroguanosine
  modified_base (10)..(10): um
  modified_base (11)..(11): gm
  modified_base (12)..(12): 2'-deoxy-2'-fluorouridine
  modified_base (13)..(13): gm
  modified_base (14)..(14): 2'-deoxy-2'-fluoroadenosine
  modified_base (15)..(15): cm
  modified_base (16)..(16): 2'-deoxy-2'-fluoroadenosine
  modified_base (17)..(17): um
  modified_base (18)..(18): 2'-deoxy-2'-fluorouridine
  modified_base (19)..(19): um
  modified_base (20)..(20): 2'-deoxy-2'-fluorouridine
  modified_base (21)..(21): gm
  modified_base (22)..(22): 2'-deoxy-2'-fluorouridine
  misc_feature (22)..(23): 5'-phosphonothioate
  modified_base (23)..(23): gm
agaaacaagugugacauuuugug

SEQ ID NO: 6769 - RNA, 23 nt, Artificial Sequence
  siRNA antisense strand against b2GPI
  modified_base (1)..(1): 2'-deoxy-2'-fluorocytidine
  modified_base (2)..(2): 2'-O-methyladenosine
  misc_feature (2)..(3): 5'-phosphonothioate
  modified_base (3)..(3): 2'-deoxy-2'-fluoroadenosine
  modified_base (4)..(4): gm
  modified_base (5)..(5): 2'-deoxy-2'-fluoroadenosine
  modified_base (6)..(6): 2'-O-methyladenosine
  modified_base (7)..(7): 2'-deoxy-2'-fluoroadenosine
  modified_base (8)..(8): cm
  modified_base (9)..(9): 2'-deoxy-2'-fluoroadenosine
  modified_base (10)..(10): 2'-O-methyladenosine
  modified_base (11)..(11): gm
  modified_base (12)..(12): 2'-deoxy-2'-fluorouridine
  modified_base (13)..(13): gm
  modified_base (14)..(14): 2'-deoxy-2'-fluorouridine
  modified_base (15)..(15): gm
  modified_base (16)..(16): 2'-deoxy-2'-fluoroadenosine
  modified_base (17)..(17): cm
  modified_base (18)..(18): 2'-deoxy-2'-fluoroadenosine
  modified_base (19)..(19): um
  modified_base (20)..(20): 2'-deoxy-2'-fluorouridine
  modified_base (21)..(21): um
  modified_base (22)..(22): 2'-deoxy-2'-fluorouridine
  misc_feature (22)..(23): 5'-phosphonothioate
  modified_base (23)..(23): gm
caagaaacaagugugacauuuug

SEQ ID NO: 6770 - RNA, 23 nt, Artificial Sequence
  siRNA antisense strand against b2GPI
  modified_base (1)..(1): 2'-deoxy-2'-fluoroadenosine
  modified_base (2)..(2): cm
  misc_feature (2)..(3): 5'-phosphonothioate
  modified_base (3)..(3): 2'-deoxy-2'-fluoroadenosine
  modified_base (4)..(4): 2'-O-methyladenosine
  modified_base (5)..(5): 2'-deoxy-2'-fluoroguanosine
  modified_base (6)..(6): 2'-O-methyladenosine
  modified_base (7)..(7): 2'-deoxy-2'-fluoroadenosine
  modified_base (8)..(8): 2'-O-methyladenosine
  modified_base (9)..(9): 2'-deoxy-2'-fluorocytidine
  modified_base (10)..(10): 2'-O-methyladenosine
  modified_base (11)..(11): 2'-O-methyladenosine
  modified_base (12)..(12): 2'-deoxy-2'-fluoroguanosine
  modified_base (13)..(13): um
  modified_base (14)..(14): 2'-deoxy-2'-fluoroguanosine
  modified_base (15)..(15): um
  modified_base (16)..(16): 2'-deoxy-2'-fluoroguanosine
  modified_base (17)..(17): 2'-O-methyladenosine
  modified_base (18)..(18): 2'-deoxy-2'-fluorocytidine
  modified_base (19)..(19): 2'-O-methyladenosine
  modified_base (20)..(20): 2'-deoxy-2'-fluorouridine
  modified_base (21)..(21): um
  modified_base (22)..(22): 2'-deoxy-2'-fluorouridine
  misc_feature (22)..(23): 5'-phosphonothioate
  modified_base (23)..(23): um
acaagaaacaagugugacauuuu

SEQ ID NO: 6771 - RNA, 23 nt, Artificial Sequence
  siRNA antisense strand against b2GPI
  modified_base (1)..(1): 2'-deoxy-2'-fluoroadenosine
  modified_base (2)..(2): 2'-O-methyladenosine
  misc_feature (2)..(3): 5'-phosphonothioate
  modified_base (3)..(3): 2'-deoxy-2'-fluorocytidine
  modified_base (4)..(4): 2'-O-methyladenosine
  modified_base (5)..(5): 2'-deoxy-2'-fluoroadenosine
  modified_base (6)..(6): gm
  modified_base (7)..(7): 2'-deoxy-2'-fluoroadenosine
  modified_base (8)..(8): 2'-O-methyladenosine
  modified_base (9)..(9): 2'-deoxy-2'-fluoroadenosine
  modified_base (10)..(10): cm
  modified_base (11)..(11): 2'-O-methyladenosine
  modified_base (12)..(12): 2'-deoxy-2'-fluoroadenosine
  modified_base (13)..(13): gm
  modified_base (14)..(14): 2'-deoxy-2'-fluorouridine
  modified_base (15)..(15): gm
  modified_base (16)..(16): 2'-deoxy-2'-fluorouridine
  modified_base (17)..(17): gm
  modified_base (18)..(18): 2'-deoxy-2'-fluoroadenosine
  modified_base (19)..(19): cm
  modified_base (20)..(20): 2'-deoxy-2'-fluoroadenosine
  modified_base (21)..(21): um
  modified_base (22)..(22): 2'-deoxy-2'-fluorouridine
  misc_feature (22)..(23): 5'-phosphonothioate
  modified_base (23)..(23): um
aacaagaaacaagugugacauuu

SEQ ID NO: 6772 - RNA, 23 nt, Artificial Sequence
  siRNA antisense strand against b2GPI
  modified_base (1)..(1): 2'-deoxy-2'-fluorouridine
  modified_base (2)..(2): gm
  misc_feature (2)..(3): 5'-phosphonothioate
  modified_base (3)..(3): 2'-deoxy-2'-fluoroadenosine
  modified_base (4)..(4): 2'-O-methyladenosine
  modified_base (5)..(5): 2'-deoxy-2'-fluorocytidine
  modified_base (6)..(6): 2'-O-methyladenosine
  modified_base (7)..(7): 2'-deoxy-2'-fluoroadenosine
  modified_base (8)..(8): gm
  modified_base (9)..(9): 2'-deoxy-2'-fluoroadenosine
  modified_base (10)..(10): 2'-O-methyladenosine
  modified_base (11)..(11): 2'-O-methyladenosine
  modified_base (12)..(12): 2'-deoxy-2'-fluorocytidine
  modified_base (13)..(13): 2'-O-methyladenosine
  modified_base (14)..(14): 2'-deoxy-2'-fluoroadenosine
  modified_base (15)..(15): gm
  modified_base (16)..(16): 2'-deoxy-2'-fluorouridine
  modified_base (17)..(17): gm
  modified_base (18)..(18): 2'-deoxy-2'-fluorouridine
  modified_base (19)..(19): gm
  modified_base (20)..(20): 2'-deoxy-2'-fluoroadenosine
  modified_base (21)..(21): cm
  modified_base (22)..(22): 2'-deoxy-2'-fluoroadenosine
  misc_feature (22)..(23): 5'-phosphonothioate
  modified_base (23)..(23): um
ugaacaagaaacaagugugacau

SEQ ID NO: 6773 - RNA, 23 nt, Artificial Sequence
  siRNA antisense strand against b2GPI
  modified_base (1)..(1): 2'-deoxy-2'-fluoroadenosine
  modified_base (2)..(2): um
  misc_feature (2)..(3): 5'-phosphonothioate
  modified_base (3)..(3): 2'-deoxy-2'-fluoroguanosine
  modified_base (4)..(4): 2'-O-methyladenosine
  modified_base (5)..(5): 2'-deoxy-2'-fluoroadenosine
  modified_base (6)..(6): cm
  modified_base (7)..(7): 2'-deoxy-2'-fluoroadenosine
  modified_base (8)..(8): 2'-O-methyladenosine
  modified_base (9)..(9): 2'-deoxy-2'-fluoroguanosine
  modified_base (10)..(10): 2'-O-methyladenosine
  modified_base (11)..(11): 2'-O-methyladenosine
  modified_base (12)..(12): 2'-deoxy-2'-fluoroadenosine
  modified_base (13)..(13): cm
  modified_base (14)..(14): 2'-deoxy-2'-fluoroadenosine
  modified_base (15)..(15): 2'-O-methyladenosine
  modified_base (16)..(16): 2'-deoxy-2'-fluoroguanosine
  modified_base (17)..(17): um
  modified_base (18)..(18): 2'-deoxy-2'-fluoroguanosine
  modified_base (19)..(19): um
  modified_base (20)..(20): 2'-deoxy-2'-fluoroguanosine
  modified_base (21)..(21): 2'-O-methyladenosine
  modified_base (22)..(22): 2'-deoxy-2'-fluorocytidine
  misc_feature (22)..(23): 5'-phosphonothioate
  modified_base (23)..(23): 2'-O-methyladenosine
augaacaagaaacaagugugaca

SEQ ID NO: 6774 - RNA, 23 nt, Artificial Sequence
  siRNA antisense strand against b2GPI
  modified_base (1)..(1): 2'-deoxy-2'-fluoroguanosine
  modified_base (2)..(2): gm
  misc_feature (2)..(3): 5'-phosphonothioate
  modified_base (3)..(3): 2'-deoxy-2'-fluoroadenosine
  modified_base (4)..(4): um
  modified_base (5)..(5): 2'-deoxy-2'-fluoroguanosine
  modified_base (6)..(6): 2'-O-methyladenosine
  modified_base (7)..(7): 2'-deoxy-2'-fluoroadenosine
  modified_base (8)..(8): cm
  modified_base (9)..(9): 2'-deoxy-2'-fluoroadenosine
  modified_base (10)..(10): 2'-O-methyladenosine
  modified_base (11)..(11): gm
  modified_base (12)..(12): 2'-deoxy-2'-fluoroadenosine
  modified_base (13)..(13): 2'-O-methyladenosine
  modified_base (14)..(14): 2'-deoxy-2'-fluoroadenosine
  modified_base (15)..(15): cm
  modified_base (16)..(16): 2'-deoxy-2'-fluoroadenosine
  modified_base (17)..(17): 2'-O-methyladenosine
  modified_base (18)..(18): 2'-deoxy-2'-fluoroguanosine
  modified_base (19)..(19): um
  modified_base (20)..(20): 2'-deoxy-2'-fluoroguanosine
  modified_base (21)..(21): um
  modified_base (22)..(22): 2'-deoxy-2'-fluoroguanosine
  misc_feature (22)..(23): 5'-phosphonothioate
  modified_base (23)..(23): 2'-O-methyladenosine
ggaugaacaagaaacaaguguga

SEQ ID NO: 6775 - RNA, 23 nt, Artificial Sequence
  siRNA antisense strand against b2GPI
  modified_base (1)..(1): 2'-deoxy-2'-fluorouridine
  modified_base (2)..(2): gm
  misc_feature (2)..(3): 5'-phosphonothioate
  modified_base (3)..(3): 2'-deoxy-2'-fluoroguanosine
  modified_base (4)..(4): 2'-O-methyladenosine
  modified_base (5)..(5): 2'-deoxy-2'-fluorouridine
  modified_base (6)..(6): gm
  modified_base (7)..(7): 2'-deoxy-2'-fluoroadenosine
  modified_base (8)..(8): 2'-O-methyladenosine
  modified_base (9)..(9): 2'-deoxy-2'-fluorocytidine
  modified_base (10)..(10): 2'-O-methyladenosine
  modified_base (11)..(11): 2'-O-methyladenosine
  modified_base (12)..(12): 2'-deoxy-2'-fluoroguanosine
  modified_base (13)..(13): 2'-O-methyladenosine
  modified_base (14)..(14): 2'-deoxy-2'-fluoroadenosine
  modified_base (15)..(15): 2'-O-methyladenosine
  modified_base (16)..(16): 2'-deoxy-2'-fluorocytidine
  modified_base (17)..(17): 2'-O-methyladenosine
  modified_base (18)..(18): 2'-deoxy-2'-fluoroadenosine
  modified_base (19)..(19): gm
  modified_base (20)..(20): 2'-deoxy-2'-fluorouridine
  modified_base (21)..(21): gm
  modified_base (22)..(22): 2'-deoxy-2'-fluorouridine
  misc_feature (22)..(23): 5'-phosphonothioate
  modified_base (23)..(23): gm
uggaugaacaagaaacaagugug

SEQ ID NO: 6776 - RNA, 23 nt, Artificial Sequence
  siRNA antisense strand against b2GPI
  modified_base (1)..(1): 2'-deoxy-2'-fluorouridine
  modified_base (2)..(2): um
  misc_feature (2)..(3): 5'-phosphonothioate
  modified_base (3)..(3): 2'-deoxy-2'-fluoroguanosine
  modified_base (4)..(4): gm
  modified_base (5)..(5): 2'-deoxy-2'-fluoroadenosine
  modified_base (6)..(6): um
  modified_base (7)..(7): 2'-deoxy-2'-fluoroguanosine
  modified_base (8)..(8): 2'-O-methyladenosine
  modified_base (9)..(9): 2'-deoxy-2'-fluoroadenosine
  modified_base (10)..(10): cm
  modified_base (11)..(11): 2'-O-methyladenosine
  modified_base (12)..(12): 2'-deoxy-2'-fluoroadenosine
  modified_base (13)..(13): gm
  modified_base (14)..(14): 2'-deoxy-2'-fluoroadenosine
  modified_base (15)..(15): 2'-O-methyladenosine
  modified_base (16)..(16): 2'-deoxy-2'-fluoroadenosine
  modified_base (17)..(17): cm
  modified_base (18)..(18): 2'-deoxy-2'-fluoroadenosine
  modified_base (19)..(19): 2'-O-methyladenosine
  modified_base (20)..(20): 2'-deoxy-2'-fluoroguanosine
  modified_base (21)..(21): um
  modified_base (22)..(22): 2'-deoxy-2'-fluoroguanosine
  misc_feature (22)..(23): 5'-phosphonothioate
  modified_base (23)..(23): um
uuggaugaacaagaaacaagugu

SEQ ID NO: 6777 - RNA, 23 nt, Artificial Sequence
  siRNA antisense strand against b2GPI
  modified_base (1)..(1): 2'-deoxy-2'-fluorocytidine
  modified_base (2)..(2): um
  misc_feature (2)..(3): 5'-phosphonothioate
  modified_base (3)..(3): 2'-deoxy-2'-fluorouridine
  modified_base (4)..(4): gm
  modified_base (5)..(5): 2'-deoxy-2'-fluoroguanosine
  modified_base (6)..(6): 2'-O-methyladenosine
  modified_base (7)..(7): 2'-deoxy-2'-fluorouridine
  modified_base (8)..(8): gm
  modified_base (9)..(9): 2'-deoxy-2'-fluoroadenosine
  modified_base (10)..(10): 2'-O-methyladenosine
  modified_base (11)..(11): cm
  modified_base (12)..(12): 2'-deoxy-2'-fluoroadenosine
  modified_base (13)..(13): 2'-O-methyladenosine
  modified_base (14)..(14): 2'-deoxy-2'-fluoroguanosine
  modified_base (15)..(15): 2'-O-methyladenosine
  modified_base (16)..(16): 2'-deoxy-2'-fluoroadenosine
  modified_base (17)..(17): 2'-O-methyladenosine
  modified_base (18)..(18): 2'-deoxy-2'-fluorocytidine
  modified_base (19)..(19): 2'-O-methyladenosine
  modified_base (20)..(20): 2'-deoxy-2'-fluoroadenosine
  modified_base (21)..(21): gm
  modified_base (22)..(22): 2'-deoxy-2'-fluorouridine
  misc_feature (22)..(23): 5'-phosphonothioate
  modified_base (23)..(23): gm
cuuggaugaacaagaaacaagug

SEQ ID NO: 6778 - RNA, 23 nt, Artificial Sequence
  siRNA antisense strand against b2GPI
  modified_base (1)..(1): 2'-deoxy-2'-fluorocytidine
  modified_base (2)..(2): cm
  misc_feature (2)..(3): 5'-phosphonothioate
  modified_base (3)..(3): 2'-deoxy-2'-fluorouridine
  modified_base (4)..(4): um
  modified_base (5)..(5): 2'-deoxy-2'-fluoroguanosine
  modified_base (6)..(6): gm
  modified_base (7)..(7): 2'-deoxy-2'-fluoroadenosine
  modified_base (8)..(8): um
  modified_base (9)..(9): 2'-deoxy-2'-fluoroguanosine
  modified_base (10)..(10): 2'-O-methyladenosine
  modified_base (11)..(11): 2'-O-methyladenosine
  modified_base (12)..(12): 2'-deoxy-2'-fluorocytidine
  modified_base (13)..(13): 2'-O-methyladenosine
  modified_base (14)..(14): 2'-deoxy-2'-fluoroadenosine
  modified_base (15)..(15): gm
  modified_base (16)..(16): 2'-deoxy-2'-fluoroadenosine
  modified_base (17)..(17): 2'-O-methyladenosine
  modified_base (18)..(18): 2'-deoxy-2'-fluoroadenosine
  modified_base (19)..(19): cm
  modified_base (20)..(20): 2'-deoxy-2'-fluoroadenosine
  modified_base (21)..(21): 2'-O-methyladenosine
  modified_base (22)..(22): 2'-deoxy-2'-fluoroguanosine
  misc_feature (22)..(23): 5'-phosphonothioate
  modified_base (23)..(23): um
ccuuggaugaacaagaaacaagu

SEQ ID NO: 6779 - RNA, 23 nt, Artificial Sequence
  siRNA antisense strand against b2GPI
  modified_base (1)..(1): 2'-deoxy-2'-fluorouridine
  modified_base (2)..(2): um
  misc_feature (2)..(3): 5'-phosphonothioate
  modified_base (3)..(3): 2'-deoxy-2'-fluorocytidine
  modified_base (4)..(4): cm
  modified_base (5)..(5): 2'-deoxy-2'-fluorouridine
  modified_base (6)..(6): um
  modified_base (7)..(7): 2'-deoxy-2'-fluoroguanosine
  modified_base (8)..(8): gm
  modified_base (9)..(9): 2'-deoxy-2'-fluoroadenosine
  modified_base (10)..(10): um
  modified_base (11)..(11): gm
  modified_base (12)..(12): 2'-deoxy-2'-fluoroadenosine
  modified_base (13)..(13): 2'-O-methyladenosine
  modified_base (14)..(14): 2'-deoxy-2'-fluorocytidine
  modified_base (15)..(15): 2'-O-methyladenosine
  modified_base (16)..(16): 2'-deoxy-2'-fluoroadenosine
  modified_base (17)..(17): gm
  modified_base (18)..(18): 2'-deoxy-2'-fluoroadenosine
  modified_base (19)..(19): 2'-O-methyladenosine
  modified_base (20)..(20): 2'-deoxy-2'-fluoroadenosine
  modified_base (21)..(21): cm
  modified_base (22)..(22): 2'-deoxy-2'-fluoroadenosine
  misc_feature (22)..(23): 5'-phosphonothioate
  modified_base (23)..(23): 2'-O-methyladenosine
uuccuuggaugaacaagaaacaa

SEQ ID NO: 6780 - RNA, 23 nt, Artificial Sequence
  siRNA antisense strand against b2GPI
  modified_base (1)..(1): 2'-deoxy-2'-fluoroguanosine
  modified_base (2)..(2): um
  misc_feature (2)..(3): 5'-phosphonothioate
  modified_base (3)..(3): 2'-deoxy-2'-fluorouridine
  modified_base (4)..(4): cm
  modified_base (5)..(5): 2'-deoxy-2'-fluorocytidine
  modified_base (6)..(6): um
  modified_base (7)..(7): 2'-deoxy-2'-fluorouridine
  modified_base (8)..(8): gm
  modified_base (9)..(9): 2'-deoxy-2'-fluoroguanosine
  modified_base (10)..(10): 2'-O-methyladenosine
  modified_base (11)..(11): um
  modified_base (12)..(12): 2'-deoxy-2'-fluoroguanosine
  modified_base (13)..(13): 2'-O-methyladenosine
  modified_base (14)..(14): 2'-deoxy-2'-fluoroadenosine
  modified_base (15)..(15): cm
  modified_base (16)..(16): 2'-deoxy-2'-fluoroadenosine
  modified_base (17)..(17): 2'-O-methyladenosine
  modified_base (18)..(18): 2'-deoxy-2'-fluoroguanosine
  modified_base (19)..(19): 2'-O-methyladenosine
  modified_base (20)..(20): 2'-deoxy-2'-fluoroadenosine
  modified_base (21)..(21): 2'-O-methyladenosine
  modified_base (22)..(22): 2'-deoxy-2'-fluorocytidine
  misc_feature (22)..(23): 5'-phosphonothioate
  modified_base (23)..(23): 2'-O-methyladenosine
guuccuuggaugaacaagaaaca

SEQ ID NO: 6781 - RNA, 23 nt, Artificial Sequence
  siRNA antisense strand against b2GPI
  modified_base (1)..(1): 2'-deoxy-2'-fluoroguanosine
  modified_base (2)..(2): gm
  misc_feature (2)..(3): 5'-phosphonothioate
  modified_base (3)..(3): 2'-deoxy-2'-fluorouridine
  modified_base (4)..(4): um
  modified_base (5)..(5): 2'-deoxy-2'-fluorocytidine
  modified_base (6)..(6): cm
  modified_base (7)..(7): 2'-deoxy-2'-fluorouridine
  modified_base (8)..(8): um
  modified_base (9)..(9): 2'-deoxy-2'-fluoroguanosine
  modified_base (10)..(10): gm
  modified_base (11)..(11): 2'-O-methyladenosine
  modified_base (12)..(12): 2'-deoxy-2'-fluorouridine
  modified_base (13)..(13): gm
  modified_base (14)..(14): 2'-deoxy-2'-fluoroadenosine
  modified_base (15)..(15): 2'-O-methyladenosine
  modified_base (16)..(16): 2'-deoxy-2'-fluorocytidine
  modified_base (17)..(17): 2'-O-methyladenosine
  modified_base (18)..(18): 2'-deoxy-2'-fluoroadenosine
  modified_base (19)..(19): gm
  modified_base (20)..(20): 2'-deoxy-2'-fluoroadenosine
  modified_base (21)..(21): 2'-O-methyladenosine
  modified_base (22)..(22): 2'-deoxy-2'-fluoroadenosine
  misc_feature (22)..(23): 5'-phosphonothioate
  modified_base (23)..(23): cm
gguuccuuggaugaacaagaaac

SEQ ID NO: 6782 - RNA, 23 nt, Artificial Sequence
  siRNA antisense strand against b2GPI
  modified_base (1)..(1): 2'-deoxy-2'-fluoroadenosine
  modified_base (2)..(2): gm
  misc_feature (2)..(3): 5'-phosphonothioate
  modified_base (3)..(3): 2'-deoxy-2'-fluoroguanosine
  modified_base (4)..(4): um
  modified_base (5)..(5): 2'-deoxy-2'-fluorouridine
  modified_base (6)..(6): cm
  modified_base (7)..(7): 2'-deoxy-2'-fluorocytidine
  modified_base (8)..(8): um
  modified_base (9)..(9): 2'-deoxy-2'-fluorouridine
  modified_base (10)..(10): gm
  modified_base (11)..(11): gm
  modified_base (12)..(12): 2'-deoxy-2'-fluoroadenosine
  modified_base (13)..(13): um
  modified_base (14)..(14): 2'-deoxy-2'-fluoroguanosine
  modified_base (15)..(15): 2'-O-methyladenosine
  modified_base (16)..(16): 2'-deoxy-2'-fluoroadenosine
  modified_base (17)..(17): cm
  modified_base (18)..(18): 2'-deoxy-2'-fluoroadenosine
  modified_base (19)..(19): 2'-O-methyladenosine
  modified_base (20)..(20): 2'-deoxy-2'-fluoroguanosine
  modified_base (21)..(21): 2'-O-methyladenosine
  modified_base (22)..(22): 2'-deoxy-2'-fluoroadenosine
  misc_feature (22)..(23): 5'-phosphonothioate
  modified_base (23)..(23): 2'-O-methyladenosine
agguuccuuggaugaacaagaaa

SEQ ID NO: 6783 - RNA, 23 nt, Artificial Sequence
  siRNA antisense strand against b2GPI
  modified_base (1)..(1): 2'-deoxy-2'-fluorouridine
  modified_base (2)..(2): 2'-O-methyladenosine
  misc_feature (2)..(3): 5'-phosphonothioate
  modified_base (3)..(3): 2'-deoxy-2'-fluoroguanosine
  modified_base (4)..(4): gm
  modified_base (5)..(5): 2'-deoxy-2'-fluorouridine
  modified_base (6)..(6): um
  modified_base (7)..(7): 2'-deoxy-2'-fluorocytidine
  modified_base (8)..(8): cm
  modified_base (9)..(9): 2'-deoxy-2'-fluorouridine
  modified_base (10)..(10): um
  modified_base (11)..(11): gm
  modified_base (12)..(12): 2'-deoxy-2'-fluoroguanosine
  modified_base (13)..(13): 2'-O-methyladenosine
  modified_base (14)..(14): 2'-deoxy-2'-fluorouridine
  modified_base (15)..(15): gm
  modified_base (16)..(16): 2'-deoxy-2'-fluoroadenosine
  modified_base (17)..(17): 2'-O-methyladenosine
  modified_base (18)..(18): 2'-deoxy-2'-fluorocytidine
  modified_base (19)..(19): 2'-O-methyladenosine
  modified_base (20)..(20): 2'-deoxy-2'-fluoroadenosine
  modified_base (21)..(21): gm
  modified_base (22)..(22): 2'-deoxy-2'-fluoroadenosine
  misc_feature (22)..(23): 5'-phosphonothioate
  modified_base (23)..(23): 2'-O-methyladenosine
uagguuccuuggaugaacaagaa

SEQ ID NO: 6784 - RNA, 23 nt, Artificial Sequence
  siRNA antisense strand against b2GPI
  modified_base (1)..(1): 2'-deoxy-2'-fluorouridine
  modified_base (2)..(2): um
  misc_feature (2)..(3): 5'-phosphonothioate
  modified_base (3)..(3): 2'-deoxy-2'-fluoroadenosine
  modified_base (4)..(4): gm
  modified_base (5)..(5): 2'-deoxy-2'-fluoroguanosine
  modified_base (6)..(6): um
  modified_base (7)..(7): 2'-deoxy-2'-fluorouridine
  modified_base (8)..(8): cm
  modified_base (9)..(9): 2'-deoxy-2'-fluorocytidine
  modified_base (10)..(10): um
  modified_base (11)..(11): um
  modified_base (12)..(12): 2'-deoxy-2'-fluoroguanosine
  modified_base (13)..(13): gm
  modified_base (14)..(14): 2'-deoxy-2'-fluoroadenosine
  modified_base (15)..(15): um
  modified_base (16)..(16): 2'-deoxy-2'-fluoroguanosine
  modified_base (17)..(17): 2'-O-methyladenosine
  modified_base (18)..(18): 2'-deoxy-2'-fluoroadenosine
  modified_base (19)..(19): cm
  modified_base (20)..(20): 2'-deoxy-2'-fluoroadenosine
  modified_base (21)..(21): 2'-O-methyladenosine
  modified_base (22)..(22): 2'-deoxy-2'-fluoroguanosine
  misc_feature (22)..(23): 5'-phosphonothioate
  modified_base (23)..(23): 2'-O-methyladenosine
uuagguuccuuggaugaacaaga

SEQ ID NO: 6785 - RNA, 23 nt, Artificial Sequence
  siRNA antisense strand against b2GPI
  modified_base (1)..(1): 2'-deoxy-2'-fluoroadenosine
  modified_base (2)..(2): um
  misc_feature (2)..(3): 5'-phosphonothioate
  modified_base (3)..(3): 2'-deoxy-2'-fluorouridine
  modified_base (4)..(4): 2'-O-methyladenosine
  modified_base (5)..(5): 2'-deoxy-2'-fluoroguanosine
  modified_base (6)..(6): gm
  modified_base (7)..(7): 2'-deoxy-2'-fluorouridine
  modified_base (8)..(8): um
  modified_base (9)..(9): 2'-deoxy-2'-fluorocytidine
  modified_base (10)..(10): cm
  modified_base (11)..(11): um
  modified_base (12)..(12): 2'-deoxy-2'-fluorouridine
  modified_base (13)..(13): gm
  modified_base (14)..(14): 2'-deoxy-2'-fluoroguanosine
  modified_base (15)..(15): 2'-O-methyladenosine
  modified_base (16)..(16): 2'-deoxy-2'-fluorouridine
  modified_base (17)..(17): gm
  modified_base (18)..(18): 2'-deoxy-2'-fluoroadenosine
  modified_base (19)..(19): 2'-O-methyladenosine
  modified_base (20)..(20): 2'-deoxy-2'-fluorocytidine
  modified_base (21)..(21): 2'-O-methyladenosine
  modified_base (22)..(22): 2'-deoxy-2'-fluoroadenosine
  misc_feature (22)..(23): 5'-phosphonothioate
  modified_base (23)..(23): gm
auuagguuccuuggaugaacaag

SEQ ID NO: 6786 - RNA, 23 nt, Artificial Sequence
  siRNA antisense strand against b2GPI
  modified_base (1)..(1): 2'-deoxy-2'-fluoroadenosine
  modified_base (2)..(2): 2'-O-methyladenosine
  misc_feature (2)..(3): 5'-phosphonothioate
  modified_base (3)..(3): 2'-deoxy-2'-fluorouridine
  modified_base (4)..(4): um
  modified_base (5)..(5): 2'-deoxy-2'-fluoroadenosine
  modified_base (6)..(6): gm
  modified_base (7)..(7): 2'-deoxy-2'-fluoroguanosine
  modified_base (8)..(8): um
  modified_base (9)..(9): 2'-deoxy-2'-fluorouridine
  modified_base (10)..(10): cm
  modified_base (11)..(11): cm
  modified_base (12)..(12): 2'-deoxy-2'-fluorouridine
  modified_base (13)..(13): um
  modified_base (14)..(14): 2'-deoxy-2'-fluoroguanosine
  modified_base (15)..(15): gm
  modified_base (16)..(16): 2'-deoxy-2'-fluoroadenosine
  modified_base (17)..(17): um
  modified_base (18)..(18): 2'-deoxy-2'-fluoroguanosine
  modified_base (19)..(19): 2'-O-methyladenosine
  modified_base (20)..(20): 2'-deoxy-2'-fluoroadenosine
  modified_base (21)..(21): cm
  modified_base (22)..(22): 2'-deoxy-2'-fluoroadenosine
  misc_feature (22)..(23): 5'-phosphonothioate
  modified_base (23)..(23): 2'-O-methyladenosine
aauuagguuccuuggaugaacaa

SEQ ID NO: 6787 - RNA, 23 nt, Artificial Sequence
  siRNA antisense strand against b2GPI
  modified_base (1)..(1): 2'-deoxy-2'-fluorocytidine
  modified_base (2)..(2): 2'-O-methyladenosine
  misc_feature (2)..(3): 5'-phosphonothioate
  modified_base (3)..(3): 2'-deoxy-2'-fluoroadenosine
  modified_base (4)..(4): um
  modified_base (5)..(5): 2'-deoxy-2'-fluorouridine
  modified_base (6)..(6): 2'-O-methyladenosine
  modified_base (7)..(7): 2'-deoxy-2'-fluoroguanosine
  modified_base (8)..(8): gm
  modified_base (9)..(9): 2'-deoxy-2'-fluorouridine
  modified_base (10)..(10): um
  modified_base (11)..(11): cm
  modified_base (12)..(12): 2'-deoxy-2'-fluorocytidine
  modified_base (13)..(13): um
  modified_base (14)..(14): 2'-deoxy-2'-fluorouridine
  modified_base (15)..(15): gm
  modified_base (16)..(16): 2'-deoxy-2'-fluoroguanosine
  modified_base (17)..(17): 2'-O-methyladenosine
  modified_base (18)..(18): 2'-deoxy-2'-fluorouridine
  modified_base (19)..(19): gm
  modified_base (20)..(20): 2'-deoxy-2'-fluoroadenosine
  modified_base (21)..(21): 2'-O-methyladenosine
  modified_base (22)..(22): 2'-deoxy-2'-fluorocytidine
  misc_feature (22)..(23): 5'-phosphonothioate
  modified_base (23)..(23): 2'-O-methyladenosine
caauuagguuccuuggaugaaca

SEQ ID NO: 6788 - RNA, 23 nt, Artificial Sequence
  siRNA antisense strand against b2GPI
  modified_base (1)..(1): 2'-deoxy-2'-fluorouridine
  modified_base (2)..(2): cm
  misc_feature (2)..(3): 5'-phosphonothioate
  modified_base (3)..(3): 2'-deoxy-2'-fluoroadenosine
  modified_base (4)..(4): 2'-O-methyladenosine
  modified_base (5)..(5): 2'-deoxy-2'-fluorouridine
  modified_base (6)..(6): um
  modified_base (7)..(7): 2'-deoxy-2'-fluoroadenosine
  modified_base (8)..(8): gm
  modified_base (9)..(9): 2'-deoxy-2'-fluoroguanosine
  modified_base (10)..(10): um
  modified_base (11)..(11): um
  modified_base (12)..(12): 2'-deoxy-2'-fluorocytidine
  modified_base (13)..(13): cm
  modified_base (14)..(14): 2'-deoxy-2'-fluorouridine
  modified_base (15)..(15): um
  modified_base (16)..(16): 2'-deoxy-2'-fluoroguanosine
  modified_base (17)..(17): gm
  modified_base (18)..(18): 2'-deoxy-2'-fluoroadenosine
  modified_base (19)..(19): um
  modified_base (20)..(20): 2'-deoxy-2'-fluoroguanosine
  modified_base (21)..(21): 2'-O-methyladenosine
  modified_base (22)..(22): 2'-deoxy-2'-fluoroadenosine
  misc_feature (22)..(23): 5'-phosphonothioate
  modified_base (23)..(23): cm
ucaauuagguuccuuggaugaac

SEQ ID NO: 6789 - RNA, 23 nt, Artificial Sequence
  siRNA antisense strand against b2GPI
  modified_base (1)..(1): 2'-deoxy-2'-fluorouridine
  modified_base (2)..(2): um
  misc_feature (2)..(3): 5'-phosphonothioate
  modified_base (3)..(3): 2'-deoxy-2'-fluorocytidine
  modified_base (4)..(4): 2'-O-methyladenosine
  modified_base (5)..(5): 2'-deoxy-2'-fluoroadenosine
  modified_base (6)..(6): um
  modified_base (7)..(7): 2'-deoxy-2'-fluorouridine
  modified_base (8)..(8): 2'-O-methyladenosine
  modified_base (9)..(9): 2'-deoxy-2'-fluoroguanosine
  modified_base (10)..(10): gm
  modified_base (11)..(11): um
  modified_base (12)..(12): 2'-deoxy-2'-fluorouridine
  modified_base (13)..(13): cm
  modified_base (14)..(14): 2'-deoxy-2'-fluorocytidine
  modified_base (15)..(15): um
  modified_base (16)..(16): 2'-deoxy-2'-fluorouridine
  modified_base (17)..(17): gm
  modified_base (18)..(18): 2'-deoxy-2'-fluoroguanosine
  modified_base (19)..(19): 2'-O-methyladenosine
  modified_base (20)..(20): 2'-deoxy-2'-fluorouridine
  modified_base (21)..(21): gm
  modified_base (22)..(22): 2'-deoxy-2'-fluoroadenosine
  misc_feature (22)..(23): 5'-phosphonothioate
  modified_base (23)..(23): 2'-O-methyladenosine
uucaauuagguuccuuggaugaa

SEQ ID NO: 6790 - RNA, 23 nt, Artificial Sequence
  siRNA antisense strand against b2GPI
  modified_base (1)..(1): 2'-deoxy-2'-fluorouridine
  modified_base (2)..(2): um
  misc_feature (2)..(3): 5'-phosphonothioate
  modified_base (3)..(3): 2'-deoxy-2'-fluorouridine
  modified_base (4)..(4): cm
  modified_base (5)..(5): 2'-deoxy-2'-fluoroadenosine
  modified_base (6)..(6): 2'-O-methyladenosine
  modified_base (7)..(7): 2'-deoxy-2'-fluorouridine
  modified_base (8)..(8): um
  modified_base (9)..(9): 2'-deoxy-2'-fluoroadenosine
  modified_base (10)..(10): gm
  modified_base (11)..(11): gm
  modified_base (12)..(12): 2'-deoxy-2'-fluorouridine
  modified_base (13)..(13): um
  modified_base (14)..(14): 2'-deoxy-2'-fluorocytidine
  modified_base (15)..(15): cm
  modified_base (16)..(16): 2'-deoxy-2'-fluorouridine
  modified_base (17)..(17): um
  modified_base (18)..(18): 2'-deoxy-2'-fluoroguanosine
  modified_base (19)..(19): gm
  modified_base (20)..(20): 2'-deoxy-2'-fluoroadenosine
  modified_base (21)..(21): um
  modified_base (22)..(22): 2'-deoxy-2'-fluoroguanosine
  misc_feature (22)..(23): 5'-phosphonothioate
  modified_base (23)..(23): 2'-O-methyladenosine
uuucaauuagguuccuuggauga

SEQ ID NO: 6791 - RNA, 23 nt, Artificial Sequence
  siRNA antisense strand against b2GPI
  modified_base (1)..(1): 2'-deoxy-2'-fluoroadenosine
  modified_base (2)..(2): um
  misc_feature (2)..(3): 5'-phosphonothioate
  modified_base (3)..(3): 2'-deoxy-2'-fluorouridine
  modified_base (4)..(4): um
  modified_base (5)..(5): 2'-deoxy-2'-fluorocytidine
  modified_base (6)..(6): 2'-O-methyladenosine
  modified_base (7)..(7): 2'-deoxy-2'-fluoroadenosine
  modified_base (8)..(8): um
  modified_base (9)..(9): 2'-deoxy-2'-fluorouridine
  modified_base (10)..(10): 2'-O-methyladenosine
  modified_base (11)..(11): gm
  modified_base (12)..(12): 2'-deoxy-2'-fluoroguanosine
  modified_base (13)..(13): um
  modified_base (14)..(14): 2'-deoxy-2'-fluorouridine
  modified_base (15)..(15): cm
  modified_base (16)..(16): 2'-deoxy-2'-fluorocytidine
  modified_base (17)..(17): um
  modified_base (18)..(18): 2'-deoxy-2'-fluorouridine
  modified_base (19)..(19): gm
  modified_base (20)..(20): 2'-deoxy-2'-fluoroguanosine
  modified_base (21)..(21): 2'-O-methyladenosine
  modified_base (22)..(22): 2'-deoxy-2'-fluorouridine
  misc_feature (22)..(23): 5'-phosphonothioate
  modified_base (23)..(23): gm
auuucaauuagguuccuuggaug

SEQ ID NO: 6792 - RNA, 23 nt, Artificial Sequence
  siRNA antisense strand against b2GPI
  modified_base (1)..(1): 2'-deoxy-2'-fluoroadenosine
  modified_base (2)..(2): 2'-O-methyladenosine
  misc_feature (2)..(3): 5'-phosphonothioate
  modified_base (3)..(3): 2'-deoxy-2'-fluorouridine
  modified_base (4)..(4): um
  modified_base (5)..(5): 2'-deoxy-2'-fluorouridine
  modified_base (6)..(6): cm
  modified_base (7)..(7): 2'-deoxy-2'-fluoroadenosine
  modified_base (8)..(8): 2'-O-methyladenosine
  modified_base (9)..(9): 2'-deoxy-2'-fluorouridine
  modified_base (10)..(10): um
  modified_base (11)..(11): 2'-O-methyladenosine
  modified_base (12)..(12): 2'-deoxy-2'-fluoroguanosine
  modified_base (13)..(13): gm
  modified_base (14)..(14): 2'-deoxy-2'-fluorouridine
  modified_base (15)..(15): um
  modified_base (16)..(16): 2'-deoxy-2'-fluorocytidine
  modified_base (17)..(17): cm
  modified_base (18)..(18): 2'-deoxy-2'-fluorouridine
  modified_base (19)..(19): um
  modified_base (20)..(20): 2'-deoxy-2'-fluoroguanosine
  modified_base (21)..(21): gm
  modified_base (22)..(22): 2'-deoxy-2'-fluoroadenosine
  misc_feature (22)..(23): 5'-phosphonothioate
  modified_base (23)..(23): um
aauuucaauuagguuccuuggau

SEQ ID NO: 6793 - RNA, 23 nt, Artificial Sequence
  siRNA antisense strand against b2GPI
  modified_base (1)..(1): 2'-deoxy-2'-fluoroadenosine
  modified_base (2)..(2): 2'-O-methyladenosine
  misc_feature (2)..(3): 5'-phosphonothioate
  modified_base (3)..(3): 2'-deoxy-2'-fluoroadenosine
  modified_base (4)..(4): um
  modified_base (5)..(5): 2'-deoxy-2'-fluorouridine
  modified_base (6)..(6): um
  modified_base (7)..(7): 2'-deoxy-2'-fluorocytidine
  modified_base (8)..(8): 2'-O-methyladenosine
  modified_base (9)..(9): 2'-deoxy-2'-fluoroadenosine
  modified_base (10)..(10): um
  modified_base (11)..(11): um
  modified_base (12)..(12): 2'-deoxy-2'-fluoroadenosine
  modified_base (13)..(13): gm
  modified_base (14)..(14): 2'-deoxy-2'-fluoroguanosine
  modified_base (15)..(15): um
  modified_base (16)..(16): 2'-deoxy-2'-fluorouridine
  modified_base (17)..(17): cm
  modified_base (18)..(18): 2'-deoxy-2'-fluorocytidine
  modified_base (19)..(19): um
  modified_base (20)..(20): 2'-deoxy-2'-fluorouridine
  modified_base (21)..(21): gm
  modified_base (22)..(22): 2'-deoxy-2'-fluoroguanosine
  misc_feature (22)..(23): 5'-phosphonothioate
  modified_base (23)..(23): 2'-O-methyladenosine
aaauuucaauuagguuccuugga

SEQ ID NO: 6794 - RNA, 23 nt, Artificial Sequence
  siRNA antisense strand against b2GPI
  modified_base (1)..(1): 2'-deoxy-2'-fluorouridine
  modified_base (2)..(2): 2'-O-methyladenosine
  misc_feature (2)..(3): 5'-phosphonothioate
  modified_base (3)..(3): 2'-deoxy-2'-fluoroadenosine
  modified_base (4)..(4): 2'-O-methyladenosine
  modified_base (5)..(5): 2'-deoxy-2'-fluorouridine
  modified_base (6)..(6): um
  modified_base (7)..(7): 2'-deoxy-2'-fluorouridine
  modified_base (8)..(8): cm
  modified_base (9)..(9): 2'-deoxy-2'-fluoroadenosine
  modified_base (10)..(10): 2'-O-methyladenosine
  modified_base (11)..(11): um
  modified_base (12)..(12): 2'-deoxy-2'-fluorouridine
  modified_base (13)..(13): 2'-O-methyladenosine
  modified_base (14)..(14): 2'-deoxy-2'-fluoroguanosine
  modified_base (15)..(15): gm
  modified_base (16)..(16): 2'-deoxy-2'-fluorouridine
  modified_base (17)..(17): um
  modified_base (18)..(18): 2'-deoxy-2'-fluorocytidine
  modified_base (19)..(19): cm
  modified_base (20)..(20): 2'-deoxy-2'-fluorouridine
  modified_base (21)..(21): um
  modified_base (22)..(22): 2'-deoxy-2'-fluoroguanosine
  misc_feature (22)..(23): 5'-phosphonothioate
  modified_base (23)..(23): gm
uaaauuucaauuagguuccuugg

SEQ ID NO: 6795 - RNA, 23 nt, Artificial Sequence
  siRNA antisense strand against b2GPI
  modified_base (1)..(1): 2'-deoxy-2'-fluorouridine
  modified_base (2)..(2): um
  misc_feature (2)..(3): 5'-phosphonothioate
  modified_base (3)..(3): 2'-deoxy-2'-fluoroadenosine
  modified_base (4)..(4): 2'-O-methyladenosine
  modified_base (5)..(5): 2'-deoxy-2'-fluoroadenosine
  modified_base (6)..(6): um
  modified_base (7)..(7): 2'-deoxy-2'-fluorouridine
  modified_base (8)..(8): um
  modified_base (9)..(9): 2'-deoxy-2'-fluorocytidine
  modified_base (10)..(10): 2'-O-methyladenosine
  modified_base (11)..(11): 2'-O-methyladenosine
  modified_base (12)..(12): 2'-deoxy-2'-fluorouridine
  modified_base (13)..(13): um
  modified_base (14)..(14): 2'-deoxy-2'-fluoroadenosine
  modified_base (15)..(15): gm
  modified_base (16)..(16): 2'-deoxy-2'-fluoroguanosine
  modified_base (17)..(17): um
  modified_base (18)..(18): 2'-deoxy-2'-fluorouridine
  modified_base (19)..(19): cm
  modified_base (20)..(20): 2'-deoxy-2'-fluorocytidine
  modified_base (21)..(21): um
  modified_base (22)..(22): 2'-deoxy-2'-fluorouridine
  misc_feature (22)..(23): 5'-phosphonothioate
  modified_base (23)..(23): gm
uuaaauuucaauuagguuccuug

SEQ ID NO: 6796 - RNA, 23 nt, Artificial Sequence
  siRNA antisense strand against b2GPI
  modified_base (1)..(1): 2'-deoxy-2'-fluorouridine
  modified_base (2)..(2): um
  misc_feature (2)..(3): 5'-phosphonothioate
  modified_base (3)..(3): 2'-deoxy-2'-fluorouridine
  modified_base (4)..(4): 2'-O-methyladenosine
  modified_base (5)..(5): 2'-deoxy-2'-fluoroadenosine
  modified_base (6)..(6): 2'-O-methyladenosine
  modified_base (7)..(7): 2'-deoxy-2'-fluorouridine
  modified_base (8)..(8): um
  modified_base (9)..(9): 2'-deoxy-2'-fluorouridine
  modified_base (10)..(10): cm
  modified_base (11)..(11): 2'-O-methyladenosine
  modified_base (12)..(12): 2'-deoxy-2'-fluoroadenosine
  modified_base (13)..(13): um
  modified_base (14)..(14): 2'-deoxy-2'-fluorouridine
  modified_base (15)..(15): 2'-O-methyladenosine
  modified_base (16)..(16): 2'-deoxy-2'-fluoroguanosine
  modified_base (17)..(17): gm
  modified_base (18)..(18): 2'-deoxy-2'-fluorouridine
  modified_base (19)..(19): um
  modified_base (20)..(20): 2'-deoxy-2'-fluorocytidine
  modified_base (21)..(21): cm
  modified_base (22)..(22): 2'-deoxy-2'-fluorouridine
  misc_feature (22)..(23): 5'-phosphonothioate
  modified_base (23)..(23): um
uuuaaauuucaauuagguuccuu

SEQ ID NO: 6797 - RNA, 23 nt, Artificial Sequence
  siRNA antisense strand against b2GPI
  modified_base (1)..(1): 2'-deoxy-2'-fluorouridine
  modified_base (2)..(2): um
  misc_feature (2)..(3): 5'-phosphonothioate
  modified_base (3)..(3): 2'-deoxy-2'-fluorouridine
  modified_base (4)..(4): um
  modified_base (5)..(5): 2'-deoxy-2'-fluoroadenosine
  modified_base (6)..(6): 2'-O-methyladenosine
  modified_base (7)..(7): 2'-deoxy-2'-fluoroadenosine
  modified_base (8)..(8): um
  modified_base (9)..(9): 2'-deoxy-2'-fluorouridine
  modified_base (10)..(10): um
  modified_base (11)..(11): cm
  modified_base (12)..(12): 2'-deoxy-2'-fluoroadenosine
  modified_base (13)..(13): 2'-O-methyladenosine
  modified_base (14)..(14): 2'-deoxy-2'-fluorouridine
  modified_base (15)..(15): um
  modified_base (16)..(16): 2'-deoxy-2'-fluoroadenosine
  modified_base (17)..(17): gm
  modified_base (18)..(18): 2'-deoxy-2'-fluoroguanosine
  modified_base (19)..(19): um
  modified_base (20)..(20): 2'-deoxy-2'-fluorouridine
  modified_base (21)..(21): cm
  modified_base (22)..(22): 2'-deoxy-2'-fluorocytidine
  misc_feature (22)..(23): 5'-phosphonothioate
  modified_base (23)..(23): um
uuuuaaauuucaauuagguuccu

SEQ ID NO: 6798 - RNA, 23 nt, Artificial Sequence
  siRNA antisense strand against b2GPI
  modified_base (1)..(1): 2'-deoxy-2'-fluorouridine
  modified_base (2)..(2): um
  misc_feature (2)..(3): 5'-phosphonothioate
  modified_base (3)..(3): 2'-deoxy-2'-fluoroadenosine
  modified_base (4)..(4): um
  modified_base (5)..(5): 2'-deoxy-2'-fluorouridine
  modified_base (6)..(6): um
  modified_base (7)..(7): 2'-deoxy-2'-fluorouridine
  modified_base (8)..(8): um
  modified_base (9)..(9): 2'-deoxy-2'-fluoroadenosine
  modified_base (10)..(10): 2'-O-methyladenosine
  modified_base (11)..(11): 2'-O-methyladenosine
  modified_base (12)..(12): 2'-deoxy-2'-fluorouridine
  modified_base (13)..(13): um
  modified_base (14)..(14): 2'-deoxy-2'-fluorouridine
  modified_base (15)..(15): cm
  modified_base (16)..(16): 2'-deoxy-2'-fluoroadenosine
  modified_base (17)..(17): 2'-O-methyladenosine
  modified_base (18)..(18): 2'-deoxy-2'-fluorouridine
  modified_base (19)..(19): um
  modified_base (20)..(20): 2'-deoxy-2'-fluoroadenosine
  modified_base (21)..(21): gm
  modified_base (22)..(22): 2'-deoxy-2'-fluoroguanosine
  misc_feature (22)..(23): 5'-phosphonothioate
  modified_base (23)..(23): um
uuauuuuuaaauuucaauuaggu

SEQ ID NO: 6799 - RNA, 23 nt, Artificial Sequence
  siRNA antisense strand against b2GPI
  modified_base (1)..(1): 2'-deoxy-2'-fluoroadenosine
  modified_base (2)..(2): 2'-O-methyladenosine
  misc_feature (2)..(3): 5'-phosphonothioate
  modified_base (3)..(3): 2'-deoxy-2'-fluorouridine
  modified_base (4)..(4): um
  modified_base (5)..(5): 2'-deoxy-2'-fluorocytidine
  modified_base (6)..(6): 2'-O-methyladenosine
  modified_base (7)..(7): 2'-deoxy-2'-fluoroguanosine
  modified_base (8)..(8): um
  modified_base (9)..(9): 2'-deoxy-2'-fluoroadenosine
  modified_base (10)..(10): gm
  modified_base (11)..(11): cm
  modified_base (12)..(12): 2'-deoxy-2'-fluorouridine
  modified_base (13)..(13): um
  modified_base (14)..(14): 2'-deoxy-2'-fluorouridine
  modified_base (15)..(15): 2'-O-methyladenosine
  modified_base (16)..(16): 2'-deoxy-2'-fluorouridine
  modified_base (17)..(17): um
  modified_base (18)..(18): 2'-deoxy-2'-fluorouridine
  modified_base (19)..(19): um
  modified_base (20)..(20): 2'-deoxy-2'-fluorouridine
  modified_base (21)..(21): 2'-O-methyladenosine
  modified_base (22)..(22): 2'-deoxy-2'-fluoroadenosine
  misc_feature (22)..(23): 5'-phosphonothioate
  modified_base (23)..(23): 2'-O-methyladenosine
aauucaguagcuuuauuuuuaaa

SEQ ID NO: 6800 - RNA, 23 nt, Artificial Sequence
  siRNA antisense strand against b2GPI
  modified_base (1)..(1): 2'-deoxy-2'-fluoroadenosine
  modified_base (2)..(2): 2'-O-methyladenosine
  misc_feature (2)..(3): 5'-phosphonothioate
  modified_base (3)..(3): 2'-deoxy-2'-fluoroadenosine
  modified_base (4)..(4): um
  modified_base (5)..(5): 2'-deoxy-2'-fluorouridine
  modified_base (6)..(6): cm
  modified_base (7)..(7): 2'-deoxy-2'-fluoroadenosine
  modified_base (8)..(8): gm
  modified_base (9)..(9): 2'-deoxy-2'-fluorouridine
  modified_base (10)..(10): 2'-O-methyladenosine
  modified_base (11)..(11): gm
  modified_base (12)..(12): 2'-deoxy-2'-fluorocytidine
  modified_base (13)..(13): um
  modified_base (14)..(14): 2'-deoxy-2'-fluorouridine
  modified_base (15)..(15): um
  modified_base (16)..(16): 2'-deoxy-2'-fluoroadenosine
  modified_base (17)..(17): um
  modified_base (18)..(18): 2'-deoxy-2'-fluorouridine
  modified_base (19)..(19): um
  modified_base (20)..(20): 2'-deoxy-2'-fluorouridine
  modified_base (21)..(21): um
  modified_base (22)..(22): 2'-deoxy-2'-fluoroadenosine
  misc_feature (22)..(23): 5'-phosphonothioate
  modified_base (23)..(23): 2'-O-methyladenosine
aaauucaguagcuuuauuuuuaa

SEQ ID NO: 6801 - RNA, 23 nt, Artificial Sequence
  siRNA antisense strand against b2GPI
  modified_base (1)..(1): 2'-deoxy-2'-fluorouridine
  modified_base (2)..(2): 2'-O-methyladenosine
  misc_feature (2)..(3): 5'-phosphonothioate
  modified_base (3)..(3): 2'-deoxy-2'-fluoroadenosine
  modified_base (4)..(4): 2'-O-methyladenosine
  modified_base (5)..(5): 2'-deoxy-2'-fluorouridine
  modified_base (6)..(6): um
  modified_base (7)..(7): 2'-deoxy-2'-fluorocytidine
  modified_base (8)..(8): 2'-O-methyladenosine
  modified_base (9)..(9): 2'-deoxy-2'-fluoroguanosine
  modified_base (10)..(10): um
  modified_base (11)..(11): 2'-O-methyladenosine
  modified_base (12)..(12): 2'-deoxy-2'-fluoroguanosine
  modified_base (13)..(13): cm
  modified_base (14)..(14): 2'-deoxy-2'-fluorouridine
  modified_base (15)..(15): um
  modified_base (16)..(16): 2'-deoxy-2'-fluorouridine
  modified_base (17)..(17): 2'-O-methyladenosine
  modified_base (18)..(18): 2'-deoxy-2'-fluorouridine
  modified_base (19)..(19): um
  modified_base (20)..(20): 2'-deoxy-2'-fluorouridine
  modified_base (21)..(21): um
  modified_base (22)..(22): 2'-deoxy-2'-fluorouridine
  misc_feature (22)..(23): 5'-phosphonothioate
  modified_base (23)..(23): 2'-O-methyladenosine
uaaauucaguagcuuuauuuuua

SEQ ID NO: 6802 - RNA, 23 nt, Artificial Sequence
  siRNA antisense strand against b2GPI
  modified_base (1)..(1): 2'-deoxy-2'-fluoroadenosine
  modified_base (2)..(2): 2'-O-methyladenosine
  misc_feature (2)..(3): 5'-phosphonothioate
  modified_base (3)..(3): 2'-deoxy-2'-fluorouridine
  modified_base (4)..(4): 2'-O-methyladenosine
  modified_base (5)..(5): 2'-deoxy-2'-fluoroadenosine
  modified_base (6)..(6): 2'-O-methyladenosine
  modified_base (7)..(7): 2'-deoxy-2'-fluorouridine
  modified_base (8)..(8): um
  modified_base (9)..(9): 2'-deoxy-2'-fluorocytidine
  modified_base (10)..(10): 2'-O-methyladenosine
  modified_base (11)..(11): gm
  modified_base (12)..(12): 2'-deoxy-2'-fluorouridine
  modified_base (13)..(13): 2'-O-methyladenosine
  modified_base (14)..(14): 2'-deoxy-2'-fluoroguanosine
  modified_base (15)..(15): cm
  modified_base (16)..(16): 2'-deoxy-2'-fluorouridine
  modified_base (17)..(17): um
  modified_base (18)..(18): 2'-deoxy-2'-fluorouridine
  modified_base (19)..(19): 2'-O-methyladenosine
  modified_base (20)..(20): 2'-deoxy-2'-fluorouridine
  modified_base (21)..(21): um
  modified_base (22)..(22): 2'-deoxy-2'-fluorouridine
  misc_feature (22)..(23): 5'-phosphonothioate
  modified_base (23)..(23): um
aauaaauucaguagcuuuauuuu

SEQ ID NO: 6803 - RNA, 23 nt, Artificial Sequence
  siRNA antisense strand against b2GPI
  modified_base (1)..(1): 2'-deoxy-2'-fluorocytidine
  modified_base (2)..(2): gm
  misc_feature (2)..(3): 5'-phosphonothioate
  modified_base (3)..(3): 2'-deoxy-2'-fluoroguanosine
  modified_base (4)..(4): cm
  modified_base (5)..(5): 2'-deoxy-2'-fluoroadenosine
  modified_base (6)..(6): 2'-O-methyladenosine
  modified_base (7)..(7): 2'-deoxy-2'-fluorouridine
  modified_base (8)..(8): 2'-O-methyladenosine
  modified_base (9)..(9): 2'-deoxy-2'-fluoroadenosine
  modified_base (10)..(10): 2'-O-methyladenosine
  modified_base (11)..(11): um
  modified_base (12)..(12): 2'-deoxy-2'-fluorouridine
  modified_base (13)..(13): cm
  modified_base (14)..(14): 2'-deoxy-2'-fluoroadenosine
  modified_base (15)..(15): gm
  modified_base (16)..(16): 2'-deoxy-2'-fluorouridine
  modified_base (17)..(17): 2'-O-methyladenosine
  modified_base (18)..(18): 2'-deoxy-2'-fluoroguanosine
  modified_base (19)..(19): cm
  modified_base (20)..(20): 2'-deoxy-2'-fluorouridine
  modified_base (21)..(21): um
  modified_base (22)..(22): 2'-deoxy-2'-fluorouridine
  misc_feature (22)..(23): 5'-phosphonothioate
  modified_base (23)..(23): 2'-O-methyladenosine
cggcaauaaauucaguagcuuua

SEQ ID NO: 6804 - RNA, 23 nt, Artificial Sequence
  siRNA antisense strand against b2GPI
  modified_base (1)..(1): 2'-deoxy-2'-fluoroguanosine
  modified_base (2)..(2): cm
  misc_feature (2)..(3): 5'-phosphonothioate
  modified_base (3)..(3): 2'-deoxy-2'-fluoroguanosine
  modified_base (4)..(4): gm
  modified_base (5)..(5): 2'-deoxy-2'-fluorocytidine
  modified_base (6)..(6): 2'-O-methyladenosine
  modified_base (7)..(7): 2'-deoxy-2'-fluoroadenosine
  modified_base (8)..(8): um
  modified_base (9)..(9): 2'-deoxy-2'-fluoroadenosine
  modified_base (10)..(10): 2'-O-methyladenosine
  modified_base (11)..(11): 2'-O-methyladenosine
  modified_base (12)..(12): 2'-deoxy-2'-fluorouridine
  modified_base (13)..(13): um
  modified_base (14)..(14): 2'-deoxy-2'-fluorocytidine
  modified_base (15)..(15): 2'-O-methyladenosine
  modified_base (16)..(16): 2'-deoxy-2'-fluoroguanosine
  modified_base (17)..(17): um
  modified_base (18)..(18): 2'-deoxy-2'-fluoroadenosine
  modified_base (19)..(19): gm
  modified_base (20)..(20): 2'-deoxy-2'-fluorocytidine
  modified_base (21)..(21): um
  modified_base (22)..(22): 2'-deoxy-2'-fluorouridine
  misc_feature (22)..(23): 5'-phosphonothioate
  modified_base (23)..(23): um
gcggcaauaaauucaguagcuuu

SEQ ID NO: 6805 - RNA, 23 nt, Artificial Sequence
  siRNA antisense strand against b2GPI
  modified_base (1)..(1): 2'-deoxy-2'-fluorouridine
  modified_base (2)..(2): gm
  misc_feature (2)..(3): 5'-phosphonothioate
  modified_base (3)..(3): 2'-deoxy-2'-fluorocytidine
  modified_base (4)..(4): gm
  modified_base (5)..(5): 2'-deoxy-2'-fluoroguanosine
  modified_base (6)..(6): cm
  modified_base (7)..(7): 2'-deoxy-2'-fluoroadenosine
  modified_base (8)..(8): 2'-O-methyladenosine
  modified_base (9)..(9): 2'-deoxy-2'-fluorouridine
  modified_base (10)..(10): 2'-O-methyladenosine
  modified_base (11)..(11): 2'-O-methyladenosine
  modified_base (12)..(12): 2'-deoxy-2'-fluoroadenosine
  modified_base (13)..(13): um
  modified_base (14)..(14): 2'-deoxy-2'-fluorouridine
  modified_base (15)..(15): cm
  modified_base (16)..(16): 2'-deoxy-2'-fluoroadenosine
  modified_base (17)..(17): gm
  modified_base (18)..(18): 2'-deoxy-2'-fluorouridine
  modified_base (19)..(19): 2'-O-methyladenosine
  modified_base (20)..(20): 2'-deoxy-2'-fluoroguanosine
  modified_base (21)..(21): cm
  modified_base (22)..(22): 2'-deoxy-2'-fluorouridine
  misc_feature (22)..(23): 5'-phosphonothioate
  modified_base (23)..(23): um
ugcggcaauaaauucaguagcuu

SEQ ID NO: 6806 - RNA, 23 nt, Artificial Sequence
  siRNA antisense strand against b2GPI
  modified_base (1)..(1): 2'-deoxy-2'-fluoroguanosine
  modified_base (2)..(2): um
  misc_feature (2)..(3): 5'-phosphonothioate
  modified_base (3)..(3): 2'-deoxy-2'-fluoroguanosine
  modified_base (4)..(4): cm
  modified_base (5)..(5): 2'-deoxy-2'-fluoroguanosine
  modified_base (6)..(6): gm
  modified_base (7)..(7): 2'-deoxy-2'-fluorocytidine
  modified_base (8)..(8): 2'-O-methyladenosine
  modified_base (9)..(9): 2'-deoxy-2'-fluoroadenosine
  modified_base (10)..(10): um
  modified_base (11)..(11): 2'-O-methyladenosine
  modified_base (12)..(12): 2'-deoxy-2'-fluoroadenosine
  modified_base (13)..(13): 2'-O-methyladenosine
  modified_base (14)..(14): 2'-deoxy-2'-fluorouridine
  modified_base (15)..(15): um
  modified_base (16)..(16): 2'-deoxy-2'-fluorocytidine
  modified_base (17)..(17): 2'-O-methyladenosine
  modified_base (18)..(18): 2'-deoxy-2'-fluoroguanosine
  modified_base (19)..(19): um
  modified_base (20)..(20): 2'-deoxy-2'-fluoroadenosine
  modified_base (21)..(21): gm
  modified_base (22)..(22): 2'-deoxy-2'-fluorocytidine
  misc_feature (22)..(23): 5'-phosphonothioate
  modified_base (23)..(23): um
gugcggcaauaaauucaguagcu

SEQ ID NO: 6807 - RNA, 23 nt, Artificial Sequence
  siRNA antisense strand against b2GPI
  modified_base (1)..(1): 2'-deoxy-2'-fluorouridine
  modified_base (2)..(2): gm
  misc_feature (2)..(3): 5'-phosphonothioate
  modified_base (3)..(3): 2'-deoxy-2'-fluorocytidine
  modified_base (4)..(4): 2'-O-methyladenosine
  modified_base (5)..(5): 2'-deoxy-2'-fluoroadenosine
  modified_base (6)..(6): um
  modified_base (7)..(7): 2'-deoxy-2'-fluoroadenosine
  modified_base (8)..(8): gm
  modified_base (9)..(9): 2'-deoxy-2'-fluorocytidine
  modified_base (10)..(10): 2'-O-methyladenosine
  modified_base (11)..(11): 2'-O-methyladenosine
  modified_base (12)..(12): 2'-deoxy-2'-fluorocytidine
  modified_base (13)..(13): 2'-O-methyladenosine
  modified_base (14)..(14): 2'-deoxy-2'-fluorouridine
  modified_base (15)..(15): gm
  modified_base (16)..(16): 2'-deoxy-2'-fluoroguanosine
  modified_base (17)..(17): cm
  modified_base (18)..(18): 2'-deoxy-2'-fluoroadenosine
  modified_base (19)..(19): gm
  modified_base (20)..(20): 2'-deoxy-2'-fluoroadenosine
  modified_base (21)..(21): gm
  modified_base (22)..(22): 2'-deoxy-2'-fluoroguanosine
  misc_feature (22)..(23): 5'-phosphonothioate
  modified_base (23)..(23): 2'-O-methyladenosine
ugcaauagcaacauggcagagga

SEQ ID NO: 6808 - RNA, 23 nt, Artificial Sequence
  siRNA antisense strand against b2GPI
  modified_base (1)..(1): 2'-deoxy-2'-fluorouridine
  modified_base (2)..(2): cm
  misc_feature (2)..(3): 5'-phosphonothioate
  modified_base (3)..(3): 2'-deoxy-2'-fluorocytidine
  modified_base (4)..(4): 2'-O-methyladenosine
  modified_base (5)..(5): 2'-deoxy-2'-fluorouridine
  modified_base (6)..(6): um
  modified_base (7)..(7): 2'-deoxy-2'-fluorouridine
  modified_base (8)..(8): um
  modified_base (9)..(9): 2'-deoxy-2'-fluorocytidine
  modified_base (10)..(10): um
  modified_base (11)..(11): 2'-O-methyladenosine
  modified_base (12)..(12): 2'-deoxy-2'-fluoroadenosine
  modified_base (13)..(13): gm
  modified_base (14)..(14): 2'-deoxy-2'-fluoroadenosine
  modified_base (15)..(15): um
  modified_base (16)..(16): 2'-deoxy-2'-fluorouridine
  modified_base (17)..(17): cm
  modified_base (18)..(18): 2'-deoxy-2'-fluorocytidine
  modified_base (19)..(19): 2'-O-methyladenosine
  modified_base (20)..(20): 2'-deoxy-2'-fluoroguanosine
  modified_base (21)..(21): cm
  modified_base (22)..(22): 2'-deoxy-2'-fluoroguanosine
  misc_feature (22)..(23): 5'-phosphonothioate
  modified_base (23)..(23): 2'-O-methyladenosine
uccauuuucuaagauuccagcga

1-30. (canceled)

31. A nucleic acid conjugate comprising: a double-stranded nucleic acid consisting of a sense strand and an antisense strand and comprising a duplex region of at least 11 base pairs; and
a ligand part, wherein an oligonucleotide strand with a strand length of 17 to 30 nucleotides in the antisense strand is complementary to a target β2GPI mRNA sequence selected from the group described in Tables 4-1 to 4-16, and
the 3′ end or 5′ end of the sense strand has the ligand part represented by formula (I), formula (II), formula (III), formula (IV) or formula (V): [chemical structure]
(wherein,
X is oligonucleotide-P(Z1)(Z2)-, where the oligonucleotide is the sense strand,
Q is absent or -T4-[Q4-P4]q4-,
R is the following structure
[Chemical Formula 2] [chemical structure]
Z1 and Z2 are, independently of each other, O or S;
q1, q2, q3 and q4 are, independently of each other, an integer from 0 to 20;
P1, P2, P3 and P4 and T1, T2, T3 and T4 are, independently of each other, absent or —CO—, —NH—, —O—, —S—, —O—CO—, —NH—CO—, —CO—O— or CO—NH—, respectively, provided that when each of q1, q2, q3 and q4 is an integer from 2 to 20, each of P1, P2, P3 and P4 may be the same or different,
Q1, Q2, Q3 and Q4 are, independently of each other, absent or a substituted or unsubstituted C₁₋₁₄ alkylene, provided that when each of q1, q2, q3 and q4 is an integer from 2 to 20, each of Q1, Q2, Q3 and Q4 may be the same or different,
L1, L2 and L3 are, independently of each other, a sugar ligand.)

32. The nucleic acid conjugate according to claim 31, wherein one or more of L1, L2 and L3 are a sugar ligand represented by the following structure [chemical structure]
(wherein, Ac represents acetyl group).

33. The nucleic acid conjugate according to claim 31, wherein L1, L2 and L3 are identical.

34. The nucleic acid conjugate according to claim 31, wherein
T1, T2 and T3 are identical,
q1, q2 and q3 are identical,
Q1, Q2 and Q3 are identical, and
P1, P2 and P3 are identical.

35. The nucleic acid conjugate according to claim 31, wherein R is [chemical structure]
(wherein, Ac represents acetyl group).

36. The nucleic acid conjugate according to claim 31, comprising a ligand part represented by any of formulae (I) to (V) at the 3′ end of the sense strand of the double-stranded nucleic acid.

37. The nucleic acid conjugate according to claim 31, comprising a ligand part represented by any of formulae (I) to (V) at the 5′ end of the sense strand of the double-stranded nucleic acid.

38. The nucleic acid conjugate according to claim 31, wherein
the duplex region comprises 11 to 27 base pairs, and
the second nucleotide from the 5′ end of the antisense strand, which is complementary to the target β2GPI mRNA sequence selected from the group described in Tables 4-1 to 4-16, is complementary to the second ribonucleotide from the 3′ end of the target β2GPI mRNA sequence.

39. The nucleic acid conjugate according to claim 31, wherein the sense strand has a strand length of 21 to 25 nucleotides, and the antisense strand has a strand length of 21 to 25 nucleotides.

40. The nucleic acid conjugate according to claim 31, wherein the 3′ end of the sense strand and the 5′ end of the antisense strand form a blunt end.

41. The nucleic acid conjugate according to claim 31, wherein the double-stranded nucleic acid comprises a 2′-modified nucleotide.

42. The nucleic acid conjugate according to claim 31, wherein the antisense strand comprises a sequence selected from the group of antisense strands described in Tables 2-1 to 2-18, Tables 3-1 to 3-18 or Tables 4-1 to 4-16.

43. The nucleic acid conjugate according to claim 31, wherein the sense strand comprises a sequence selected from the group of sense strands described in Tables 2-1 to 2-18, Tables 3-1 to 3-18 or Tables 4-1 to 4-16.

44. A nucleic acid conjugate-comprising composition, comprising the nucleic acid conjugate according to claim 31.

45. A method for suppressing expression of a β2GPI gene, comprising introducing a double-stranded nucleic acid into cells by using the composition according to claim 44.

46. The method according to claim 45, wherein the cells are cells in the liver of a mammal.

47. The method according to claim 45, wherein the method of introduction into cells is a method of introduction into cells by intravenous administration or subcutaneous administration.

48. A method for treating a β2GPI-associated disease, comprising administrating the composition according to claim 44 to a mammal.

49. The method according to claim 48, wherein the β2GPI-associated disease is an autoimmune disease or thrombosis.

50. The method according to claim 48, wherein the method of administration is intravenous administration or subcutaneous administration.
